(19) United States
(12) Patent Application Publication
(10) Pub. No.: US 2009/0113564 A1
(43) Pub. Date: Apr. 30, 2009

(54) Genetically Engineered and Phenotyped Mice and Stem Cell Clones for Producing the Same

(76) Inventors: Alejandro Abuin, The Woodlands, TX (US); Mark Dominic Borromeo, San Antonio, TX (US); Katherin E. Combs, Spring, TX (US); Ling Ling Culbertson, Spring, TX (US); Zhi-Yong Ding, Longmont, CO (US); Joel Edwards, Las Flores, CA (US); Liangfen Fan, Spring, TX (US); Rosemary Girgis, Houston, TX (US); Leslie Jane Green, Conroe, TX (US); Allison Anne Byers Horner, Dickinson, TX (US); Erin Marie Massey, Conroe, TX (US); Dina Rebecca McLain, San Antonio, TX (US); Laurie Jeanette Minze, Katy, TX (US); Charles Montgomery, Jay, OK (US); Bobby Joe Payne, The Woodlands, TX (US); Carolina Rangel, Houston, TX (US); Arthur T. Sands, The Woodlands, TX (US); Tracy Ellen Willis Sevaux, Conroe, TX (US); Zheng-Zheng Shi, The Woodlands, TX (US); Mary Jean Sparks, Magnolia, TX (US); Joy Anne Stala, Dallas, TX (US); Peter Vogel, The Woodlands, TX (US); Brian Zambrowicz, The Woodlands, TX (US)

Correspondence Address: LEXICON PHARMACEUTICALS, INC., 8800 TECHNOLOGY FOREST PLACE, THE WOODLANDS, TX, 77381-1160, US

(21) Appl. No.: 12/057,851

(22) Filed: Mar. 28, 2008

Related U.S. Application Data
(63) Continuation of application No. 11/400,067, filed on Apr. 7, 2006, now abandoned.
Application No. 11/400,067 is a continuation-in-part of application No. 10/060,066, filed on Jan. 29, 2002, now abandoned.
Application No. 11/400,067 is a continuation-in-part of application No. 11/283,386, filed on Nov. 18, 2005, now abandoned.
Application No. 11/283,386 is a continuation of application No. 10/142,593, filed on May 9, 2002, now abandoned.
Application No. 11/400,067 is a continuation-in-part of application No. 11/021,492, filed on Dec. 23, 2004, now abandoned.
Application No. 11/021,492 is a continuation of application No. 10/202,489, filed on Jul. 23, 2002, now abandoned.
Application No. 11/400,067 is a continuation-in-part of application No. 11/212,141, filed on Aug. 25, 2005, now abandoned.
Application No. 11/212,141 is a continuation of application No. 10/256,268, filed on Sep. 26, 2002, now abandoned.
Application No. 11/400,067 is a continuation-in-part of application No. 11/179,042, filed on Jul. 11, 2005, now abandoned.
Application No. 11/179,042 is a continuation of application No. 10/327,684, filed on Dec. 20, 2002, now abandoned.
Application No. 11/400,067 is a continuation-in-part of application No. 10/351,246, filed on Jan. 23, 2003, now abandoned.
Application No. 10/351,246 is a continuation of application No. 09/924,149, filed on Aug. 7, 2001, now abandoned.
(60) Provisional application No. 60/265,574, filed on Jan. 31, 2001.
(60) Provisional application No. 60/290,495, filed on May 11, 2001.
(60) Provisional application No. 60/307,670, filed on Jul. 25, 2001.
(60) Provisional application No. 60/324,929, filed on Sep. 26, 2001.
(60) Provisional application No. 60/343,085, filed on Dec. 20, 2001.
(60) Provisional application No. 60/223,681, filed on Aug. 8, 2000.

(51) Int. Cl. A01K 67/027

(52) U.S. Cl. 800/18

(57) ABSTRACT

The current invention relates to genetically engineered mice, cells derived from those mice, and polynucleotides and polypeptides corresponding to genes affected by the engineered mutation. The invention also relates to antibodies raised in a mouse of the invention. The invention further provides methods for using the mice, cells, polynucleotides, polypeptides and antibodies of the invention.

[0001] This application is a continuation-in-part of U.S. application Ser. No. 10/060,066 filed Jan. 29, 2002, currently pending, which claims the benefit of U.S. Provisional Application Ser. No. 60/265,574 filed Jan. 31, 2001, now abandoned; a continuation-in-part of U.S. application Ser. No. 11/283,386 filed Nov. 18, 2005, currently pending, which is a continuation of U.S. application Ser. No. 10/142,593 filed May 9, 2002, now abandoned, which claims the benefit of U.S. Provisional Application Ser. No. 60/290,495 filed May 11, 2001, now abandoned; a continuation-in-part of U.S. application Ser. No. 11/021,492 filed Dec. 23, 2004, currently pending, which is a continuation of U.S. application Ser. No. 10/202,489 filed Jul. 23, 2002, now abandoned, which claims the benefit of U.S. Provisional Application Ser. No. 60/307,670 filed Jul. 25, 2001, now abandoned; a continuation-in-part of U.S. application Ser. No. 11/212,141 filed Aug. 25, 2005, currently pending, which is a continuation of U.S. application Ser. No. 10/256,268 filed Sep. 26, 2002, now abandoned, which claims the benefit of U.S. Provisional Application Ser. No. 60/324,929 filed Sep. 26, 2001, now abandoned; a continuation-in-part of U.S. application Ser. No. 11/179,042 filed Jul. 11, 2005, currently pending, which is a continuation of U.S. application Ser. No. 10/327,684 filed Dec. 20, 2002, now abandoned, which claims the benefit of U.S. Provisional Application Ser. No. 60/343,085 filed Dec. 20, 2001, now abandoned; and a continuation-in-part of U.S. application Ser. No. 10/351,246 filed Jan. 23, 2003, currently pending, which is a continuation of U.S. application Ser. No. 09/924,149 filed Aug. 7, 2001, now abandoned, which claims the benefit of U.S. Provisional Application Ser. No. 60/223,681 filed Aug. 8, 2000, now abandoned; all of which are incorporated herein by reference.

### 1.0 SUBMISSION ON COMPACT DISC

[0002] The contents of the following submission on compact discs are incorporated herein by reference in their entirety: a compact disc copy of the Sequence Listing (COPY 1) (file name: Lexicon 2549 Listing.txt; date recorded: Apr. 6, 2006; size: 1,442 kilobytes); a duplicate compact disc copy of the Sequence Listing (COPY 2) (file name: Lexicon 2549 Listing.txt; date recorded: Apr. 6, 2006; size: 1,442 kilobytes); and a computer readable form copy of the Sequence Listing (CRF COPY) (file name: Lexicon 2549 Listing.txt; date recorded: Apr. 6, 2006; size: 1,442 kilobytes).

### 2.0 FIELD OF THE INVENTION

[0003] The present invention relates to genotypic and phenotypic analyses of multiple genes in mice for the rapid and efficient development of drugs and therapies. The invention also relates to the individual mutant animal lines and their respective phenotypes, ES cells to generate animals and other cell lines, and antibodies generated in the animals. The massive phenotypic analysis provided by the present invention represents a key breakthrough in making drug development for therapy more efficient and thus faster and more affordable.

### 3.0 BACKGROUND

[0004] The development of new drugs and therapies has traditionally benefited from modeling the disease of interest, typically in a suitable animal species. Species of particular interest share a close evolutional relationship to humans, are physiologically relevant to human disease, are capable of supporting research through short generational cycles, and are scientifically well defined to generate consistent and meaningful data of disease phenotype and physiology of drug effects. For over a century, mice have been recognized as highly suited for drug development.

[0005] Where animal models for disease are sought, they can be obtained by observing phenotypes in animals to find a naturally occurring variant that mimics the pathology of a disease of interest as closely as possible. Ideally, such a variant would be the result of a naturally occurring mutation so that the animal could be propagated for research. Yet, the likelihood of finding such animal models is small and only a limited number of desirable animal models for diseases of interest have been identified this way.

[0006] New ways of generating mouse variants resulted from technologies for engineering mutations into the genome of mice. These technologies facilitate the introduction of changes into the mouse genome, either through random or targeted events. Of particular value is site specific mutagenesis of the mouse genome, especially when combined with the genetic and phenotypic characterization of the resulting mouse variant. Site specific mouse mutants have provided valuable insights that have been key in improved allocation of drug development efforts and thus saved valuable time und ultimately lives.

[0007] Expanding the number of mouse variants with engineered depletion of genomic function would provide additional opportunities for more efficient drug development for therapy. Particularly desirable would be a bank of mouse mutants, each representing a depletion of a particular genomic function, each being characterized as to the specific site of the mutation and the gene affected, and each mutant being characterized on the homozygote, heterozygote, and wild-type level for a number of different physiological parameters for quick identification of most desirable phenotypes for multiple types of diseases. Such a bank of mouse mutants would be especially useful if it included functional depletions for most genes in the mouse genome as that would substantially increase the probability of obtaining a mouse mutant with a phenotype specific for many diseases of interest.

[0008] The present invention provides such a bank of mouse mutants in certain embodiments. More specifically, the present invention provides a bank of multiple mutant mouse lines, representing functional depletions of many genes of the mouse genome, all genetically and phenotypically characterized.

### 4.0 SUMMARY OF THE INVENTION

[0009] The present invention provides in certain embodiments a library or bank of mice (mouse library), each mouse comprising a mutation engineered into its genome, and in certain preferred embodiments, each mouse of the library comprises an engineered mutation that is distinct from the mutation engineered into the other mice of the library (distinct engineered mutation). In certain preferred embodiments, a mouse library according to the invention comprises at least 50 mice with each carrying a distinct engineered mutation, and more preferably at least 100 mice, 1,000 mice, 10,000 mice, or 50,000 mice, each library comprising mice carrying a distinct engineered mutation. The current invention also comprises individual mice and mouse lines carrying an engineered mutation.

[0010] In certain preferred embodiments, a mouse library of the current invention comprises mice that can be bred to be heterozygous and/or homozygous for the engineered mutation. In certain other preferred embodiments, a mouse library of the current invention comprises mice that have been characterized as to the engineered mutation, changes in gene expression, and the phenotype of the mice, preferably heterozygous and homozygous for the engineered mutation. In certain embodiments, the current invention provides animal models for drug development. For example, a mouse of the current invention, in certain embodiments, lacks a genomic function and said function is linked to phenotypic traits affiliated with one or more diseases.

[0011] The invention further comprises cells, for example, an embryonic stem cell (ES cell), a fibroblast, a nerve cell, a muscle cell, any cell derived from an ES cell of the invention. In certain embodiments, a cell of the invention carries an engineered mutation.

[0012] In certain other embodiments, the current invention provides antibodies, and in certain preferred embodiments, antibodies generated using a mouse of the invention.

### 5.0 BRIEF DESCRIPTION OF THE DRAWINGS

[0013] FIGS. 1-18: Each figure presents one of gene trap vectors VICTR21, VICTR22, VICTR23, VICTR24, VICTR25, VICTR30, VICTR31, VICTR32, VICTR37, VICTR40, VICTR41, VICTR44, VICTR48, VICTR48 MTII, VICTR49, VICTR54, VICTR628, and VICTR743. The total length of each vector is provided in nucleotides. Abbreviations followed by an arabic number represent restriction enzymes and the number constitutes the number of the nucleotide in the vector at which the enzymes are capable of cutting the vector. Enzymes with an asterix at the number can cut the vector only at a single site. Non-cutters are enzymes that cannot cut the vector at any site. Sequence elements of the vector are abbreviated as follows. Where a sequence element is written upside down, it means the orientation of the element is reversed. LTR is a modified (deleted enhancer) long terminal repeat from Moloney murine leukemia virus; SA is a splice acceptor; SA-TM is a splice acceptor-transmembrane domain for trapping secreted proteins more effectively (allowing the fusion protein resulting from genomic and vector sequences to be retained intracellularly); frt is FRT recombinase; IRES is an internal ribosome entry site from EMCV (encephalomyocarditis virus); BGEO (or βOGEO) is a fusion of betagalactosidase and neomycin (neo) resistance gene; pA is a SV40 gene polyadenylation signal sequence; PGK is a phosphoglycerate kinase promoter from mouse phosphoglycerate kinase-1 gene; BTK is a mouse Bruton agammaglobulinemia tyrosine kinase gene, first non-coding exon; PURO is a puromycin resistance gene coding sequence that lacks a polyadenylation sequence; SD is a splice donor sequence from mouse BTK first exon; NEO is a neomycin resistance gene; Gastrin is the first exon of the gastrin gene; SV40tpA is a concatenated triple polyadenylation signal from the major viral coat protein 1 gene of the SV40 virus; BGlobinTerm is a transcriptional terminator that operates in opposite direction of viral transcription; CRE is cre recombinase; MTII pA is a 530 base pair segment that includes the last two exons, with intervening intron, of the mouse metallothionein 2 gene and its polyadenylation signal.

### 6.0 DETAILED DESCRIPTION OF THE INVENTION

[0014] The present invention describes libraries of mice carrying engineered mutations affecting multiple genes and facilitating efficient drug development for therapy. The present invention provides mouse libraries, individual lines of mice comprising the described mouse libraries, ES cells to generate mice and other cell types specific for the mice of the libraries. The invention also comprises other compositions and methods related to the mouse libraries and ES cells described herein.

### 6.1 Mouse Libraries of the Current Invention

[0015] A mouse library of the invention preferably comprises a collection of mice and, more preferably, mice of said collection have an engineered genomic mutation. A collection of mice comprising a mouse library of the invention, in certain embodiments, comprises at least 50 mice, or at least 100 mice, at least 200 mice, at least 300 mice, at least 400 mice, at least 500 mice, at least 750 mice, at least 1000 mice, at least 2500 mice, at least 5000 mice, at least 7500 mice, at least 10000 mice, at least 25000 mice, at least 50000 mice, or at least 100000 mice. The mice in a collection of mice of the invention, in certain preferred embodiments, comprise an engineered genomic mutation. A collection of mice of the present invention, in certain embodiments, comprises at least 50 different engineered genomic mutations, or at least 100, at least 200, at least 300, at least 400, at least 500, at least 750, at least 1000, at least 2500, at least 5000, at least 7500, at least 10000, at least 25000, at least 50000, or at least 100000 engineered genomic mutations.

[0016] A mouse of a mouse library of the invention, in certain embodiments, may be of any strain, or of a mixture of strains, or a chimera, or a derivative of one or more strains. Examples of mouse strains are 129, Black 6, C57BL/6, CD-1. See, for example, U.S. Pat. Nos. 6,878,542; 6,815,185 for mouse strains, all of which are incorporated herein by reference for all purposes. A listing of various mouse strains is provided in “Genetic Variants and Strains of the Laboratory Mouse” 3rd Ed., Vols. 1 and 2, 1996, Lyon et al., eds., Oxford University Press, NY, N.Y., herein incorporated by reference in its entirety. The mouse may be a female or male mouse, a young mouse, an adult mouse, a mouse with a known phenotype or an unknown phenotype, a mouse with a known genotype or an unknown genotype.

[0017] An engineered mutation in a mouse of a library of the current invention affects the genome in the nucleus of the cells of the mice. An engineered mutation, in certain embodiments, comprises any one, two, three, four, five or more of an insertion, a deletion, a replacement, an inversion, a truncation, a point mutation, a translocation, a duplication, an amplification, a recombination, and/or any other kind of alteration of the genome. A mutation may, in certain embodiments, affect, change, disturb or alter the structure of the genome of a mouse, or the function of the genome, or both. A mutation may affect, change, disturb or alter the genome of a mouse, a chromosome, a gene, a promoter, an enhancer, a telomere, an intron, an exon, a splice site, an untranscribed region, an untranslated region, a transcribed region, a translated region, a transcription initiation site, a translation initiation site, a termination codon, a polyadenylation signal, a centromer, or any other structure or element found in the genome. A mutation may comprise, in certain embodiments, an engineered or recombinant polynucleotide of at least 500 base pairs, at least 1000 base pairs, at least 2000 base pairs, at least 5000 base pairs, at least 10000 base pairs, or at least 20000 base pairs.

[0018] An engineered genomic mutation of the current invention, in certain embodiments, comprises a mutation that is caused through human influence or intervention. For example, any human effort that increases the probability of a mutation is contemplated. In certain preferred embodiments, an engineered genomic mutation results from an assay or technique known in the field of biotechnology, molecular biology or genetic engineering, or any other discipline engaged in the manipulation of a mammalian genome. Where a mutation is engineered into the genome of a cell or an animal, off-spring of said cell or animal are also contemplated as carrying said engineered genomic mutation.

[0019] A mouse library of the current invention may be maintained, kept or stored, in certain embodiments, as a collection of living animals, a collection of ES cells, a collection of eggs, a collection of fertilized eggs, a collection of gametes, a collection of morulae, a collection of blastocysts, a collection of embryos, a collection of oocytes, a collection of fetuses, or a collection of cells of any cell type or cell aggregate that is capable of generating a mouse. Such a collection would comprise, in certain embodiments, each engineered genomic mutation so that a mouse of each mouse line of the mouse library may be generated. A mouse library of the current invention may be stored, in certain embodiments, through cryopreservation. In certain embodiments, cryopreservation is not used to store a living animal. Methods for cryopreservation useful to store a mouse library of the current invention are known in the art and are described, for example, in U.S. Pat. Nos. 5,962,213; 6,361,934; 6,500,608; 6,503,698; 6,519,954; and in Van den Abbeel et al., 1994, Cryobiology 31(5):423-33; Dumoulin et al., 1994, Fertil Steril. 62(4):793-8; Vasuthevan et al., 1992, J. Assist. Reprod. Genet. 9(6):545-50; Thornton et al., 1999, Mamm. Genome 10(10):987-92; Songsasen and Leibo, 1997, Cryobiology 35(3):255-69; Songsasen and Leibo, 1997, Cryobiology 35(3):240-54; Songsasen et al., 1997, Biol. Reprod. 56(1):143-52; Critser and Mobraaten, 2000, ILAR J. 41(4):197-206; Kasai and Mukaida, 2004, Reprod. Biomed. Online 9(2):164-170; Menezo, 2004, Obstet. Gynecol. Reprod. Biol. 115 Suppl 1:S12-5; Sztein et al., 2001, Cryobiology 42(1):28-39; Sztein et al., 1999, Lab.-Anim.-Sci. 49(1):99-100; Sztein et al., 1998, Biol.-Reprod. 58(4): 1071-4, all of which are incorporated herein by reference for all purposes.

[0020] Mutations and ways of engineering mutations into a mouse genome are also described in U.S. Patent Application Nos. 20020182724, 20040072243, 20040259253, 20050059060, 20050053953; and in U.S. Pat. Nos. 6,080,576; 6,136,566; 6,207,371; 6,218,123; 6,436,707; 6,776,988; 6,808,921; 6,855,545, all of which are incorporated herein by reference for all purposes.

### 6.1.1 Generating Mouse Libraries of the Current Invention

[0021] A mouse library of the current invention, in certain embodiments, is generated by engineering a genomic mutation into a plurality of mice. A genomic mutation is engineered into a mouse, in certain embodiments, by engineering said mutation into a cell, and preferably into a cell that is useful to generate a mouse. In certain embodiments, a mutation is engineered into a gamete, a fertilized egg, a stem cell, an embryonic stem cell, a hematopoietic stem cell, or any other type of cell useful for generating a mouse. Examples of cell lines useful for generating a mouse include AB 2.2, HES-1, J1, CGR-8, R1, E14.1, E14TG2a. See, for example, U.S. Pat. Nos. 6,875,607; 6,867,035; 6,878,542; 6,815,185; 6,884,622 for cell lines, all of which are incorporated herein by reference for all purposes.

[0022] A genomic mutation, in certain embodiments, is engineered by introducing an oligonucleotide or a polynucleotide into a cell that is useful to generate a mouse. A useful nucleotide, oligonucleotide, or polynucleotide may be naturally occurring or not naturally occurring. In certain preferred embodiments, DNA, RNA, or any kind of derivative of either one, is introduced into a cell useful to generate a mouse. A DNA or RNA, or derivative of either, useful for introduction into a cell, in certain embodiments, is a vector, a virus, a construct, a replacement vector, an integration vector, a linear molecule, a circular molecule. A polynucleotide useful for engineering a genomic mutation into a cell, in certain embodiments, comprises one, two, three, or more of a marker, a marker facilitating the survival of a cell, a marker facilitating the killing of a cell, a stretch of genomic sequence, a splice donor site, a splice acceptor site, a multi-cloning site, a poly-adenylation signal, a transcription initiation site, a translation initiation site, an intron, an exon, vector sequences or any other element desired for engineering a desired genomic mutation. A stretch of genomic sequence may, in certain embodiments, have a length of 0 to 1 million bases, or 0.5 to 2 million bases, 0.2 to 20.0 kilobases, 0.2 to 5.0 kilobases, or 1.0 to 10.0 kilobases. Examples of vectors are Bluescript, pUC, or any other vector that facilitates the cloning, manipulation, sequencing, identification, isolation, amplification, and/or purification of a polynucleotide. See, for example, U.S. Pat. Nos. 6,815,185; 6,884,622 for background on designing, manipulating and cloning polynucleotides, all of which are incorporated herein by reference for all purposes.

[0023] In certain embodiments, a genomic mutation of the current invention is engineered by introducing a vector as shown in one or more of FIGS. 1 through 18 into a mouse cell, for example, an embryonic stem cell. A vector as shown in each of FIGS. 1 through 18 is referred to as a gene trap vector. In certain preferred embodiments, a gene trap vector may integrate into a gene in the genome of a cell. In certain other preferred embodiments, the integration of a gene trap vector into a gene results in a transcript from that gene comprising vector sequences and gene sequences (hybrid transcript). In certain other preferred embodiments, a hybrid transcript results from a gene with an integrated gene trap vector after transcription of the gene and before and following splicing of the transcript. Elements of gene trap vectors useful for making a mouse or cell of the current invention are known to those of skill in the art, for example, a mouse PGK promoter is discussed in Adra et al., 1987, Gene 60(1):65-74; a mouse BTK sequence is discussed in Sideras et al., 1994, J. Immunol. 153(12):5607-17; an SABgeo sequence and a splice acceptor sequence from adenovirus are discussed in Friedrich and Soriano, 1991, Genes Dev. 5(9):1513-23; a pGen (MoMuLV backbone) sequence is discussed in Soriano et al., 1991, J. Virol. 65(5):2314-9; a bGH polyadenylation sequence and a SV40 polyadenylation sequence are discussed in Pfarr et al., 1986, DNA 5(2):115-22, a polyadenylation signal from the major viral coat protein 1 gene of the SV40 virus is discussed in Maxwell et al., 1989, Biotechniques. 7(3):276-80, all of which are incorporated by reference.

[0024] In certain other preferred embodiments, a mutation is engineered into a cell that is maintained in culture or any environment that allows the manipulation of large numbers of cells and that allows the screening and identification of cells with desired characteristics, for example, cells that comprise an engineered genomic mutation of interest. In certain other embodiments, cells are maintained, grown, manipulated, screened and/or identified using one, two, three, four, or more different cultures, media, environments, buffers, sera, salts, and supports. See, for example, U.S. Pat. Nos. 6,875,607; 6,878,542; 6,815,185 for background on tissue culture, all of which are incorporated herein by reference for all purposes.

[0025] In certain other embodiments, a genomic mutation is engineered into a mouse by introducing said mutation into the cells of a mouse. For example, an oligonucleotide or a polynucleotide may be introduced into the cells of a mouse by any means capable of such delivery, for example, a virus, a liposome or any other means known in the art.

[0026] Background on generating a mouse library, including cloning, tissue culture, mutagenesis and generating mice, is also described in U.S. Patent Application Nos. 20020182724, 20040072243, 20040259253, 20050059060, 20050053953; and in U.S. Pat. Nos. 6,080,576; 6,136,566; 6,207,371; 6,218,123; 6,436,707; 6,776,988; 6,808,921; 6,855,545, all of which are incorporated herein by reference for all purposes.

### 6.1.2 Characterizing Mice of the Libraries of the Current Invention

[0027] Mice of a library of the current invention, in certain embodiments, are characterized by analyzing mouse lines comprising said library. A mouse line, in certain embodiments, consists of mice that are related as off-spring. In certain other embodiments, a mouse line consists of mice that comprise the same engineered genomic mutation. A mouse line, in certain embodiments, comprises mice that are homozygous or heterozygous for the same engineered genomic mutation, mice that are chimeras comprising cells that comprise that same engineered genomic mutation, and mice that are off-spring (or progeny) of such homozygotes, heterozygotes or chimeras, including wild-type off-spring that does not carry the same engineered genomic mutation. A mouse of each of these aforementioned types that is part of a mouse line of the invention is referred to herein as Homozygote, Heterozygote, Chimera, Off-Spring or Wild-Type. In certain embodiments, at least 50 percent of all mouse lines comprising a library of the invention are characterized, in certain other preferred embodiments, at least 75 percent or all mouse lines of such a library are characterized.

[0028] A mouse line of the present invention, in certain embodiments, is characterized by analyzing a Homozygote, a Heterozygote, a Chimera, an Off-Spring, and a Wild-Type of said mouse line, or any one, two, three or four thereof. In certain embodiments, at least one Homozygote, one Heterozygote and one Wild-Type mouse is analyzed, or at least two of each of the three types, at least three, at least four, at least five, at least eight, at least ten, or at least twenty. A mouse is characterized, in certain embodiments, by analyzing any aspect of the mouse or relating to the mouse. In certain embodiments, a mouse is characterized by analyzing all or a part of its structure, function, anatomy, physiology, genetics, genome, gene expression, cell growth, tumorigenesis, development, embryology, behavior, movement, susceptibility to disease, life span, weight, skeleton, or any other aspect of the mouse. A Homozygote or Heterozygote mouse of the current invention is characterized by at least identifying a gene affected by an engineered genomic mutation of said mouse.

### 6.1.2.1 Genetic Analysis

[0029] A mouse of the invention, in certain embodiments, is analyzed genetically. A preferred genetic analysis comprises determining or identifying any change or changes in the genome of a mouse comprising an engineered genomic mutation when compared to a mouse that does not comprise such a mutation. A genetic analysis, according to certain embodiments, comprises identifying a part of the genome affected by the engineered mutation, isolating a part of the genome comprising the engineered mutation, cloning a part of the genome comprising the engineered mutation, sequencing DNA, sequencing RNA, performing a restriction analysis, determining the site where an exogenous polynucleotide integrated into the genome, determining the presence of a rearrangement of parts of the genome, determining if a part of the genome has been deleted, determining if a part of the genome has been multiplied, determining if a part of the genome has been modified, or determining if any other kind of change has occurred to the genome of a mouse of the invention. See, for example, U.S. Pat. Nos. 6,875,607; 6,867,035; 6,878,542; 6,815,185; 6,884,622 for background on cloning.

[0030] Background on genetic analysis is also described in U.S. Patent Application Nos. 20020182724, 20040072243, 20040259253, 20050059060, 20050053953; and in U.S. Pat. Nos. 6,080,576; 6,136,566; 6,207,371; 6,218,123; 6,436,707; 6,776,988; 6,808,921; 6,855,545, all of which are incorporated herein by reference for all purposes.

### 6.1.2.2 Transcriptional Analysis

[0031] A mouse of the invention, in certain embodiments, is analyzed by performing a transcriptional analysis. A transcriptional analysis, according to certain embodiments, comprises determining the activity of any part of the genome of a mouse, for example, the activity of one or more genes. A transcriptional analysis, according to certain embodiments, comprises determining the quantity, stability, structure, location, sequence, modification, binding, or folding of RNA, for example, mRNA, hnRNA, tRNA, rRNA, or any other kind of RNA.

[0032] A transcriptional analysis comprises, in certain preferred embodiments, identifying an RNA molecule found in a mouse carrying the engineered genomic mutation but not in a mouse of the same strain not carrying that mutation (“mutated RNA”). In certain embodiments, a mutated RNA results from transcription of a part of the genome altered by the engineered genomic mutation, for example, if the engineered mutation resulted in the insertion of an exogenous sequence into an exon of a gene, transcription of that gene would result in an RNA molecule that includes the exogenous sequence. Or, for example, where the engineered mutation inserts exogenous exon sequences and one or more splice sites into a gene (for example, an exogenous exon with a splice acceptor site upstream and a splice donor site downstream may integrate into an intron) transcription of that gene would result in an RNA molecule that includes the exogenous exon sequences and the splice sites (“mutated hnRNA”). A mutated hnRNA, in certain embodiments, would undergo splicing to yield mature RNA molecules found in a mouse with an engineered genomic mutation (“mutated mRNA”) but not in a Wild-Type mouse (for example, the mutated mRNA would include an exogenous exon sequence that is not found in mRNA resulting from the non-mutated gene).

[0033] Background on transcriptional analysis is also described in U.S. Patent Application Nos. 20020182724, 20040072243, 20040259253, 20050059060, 20050053953; and in U.S. Pat. Nos. 6,080,576; 6,136,566; 6,207,371; 6,218,123; 6,436,707; 6,776,988; 6,808,921; 6,855,545, all of which are incorporated herein by reference for all purposes.

### 6.1.2.3 Phenotypic Analysis

[0034] A mouse of the invention, in certain embodiments, is analyzed by performing a phenotypic analysis. A phenotypic analysis, according to certain embodiments, comprises an assessment or evaluation of the behavior, coat color, size, proportions, shape, skeleton, reflexes, blood, blood protein, blood composition, cholesterol level, life span, weight, organ size, organ shape, organ function, brain size, or any other phenotypic aspect.

[0035] s6.1.2.4 Computational Analysis

[0036] A mouse of the invention, in certain embodiments, is analyzed by performing a computational analysis. A computational analysis, according to certain embodiments, comprises a comparison of data derived from a mouse, a mouse line or a mouse library of the current invention with data known in the art. In certain other embodiments, a computational analysis comprises a comparison of data derived from a mouse or a mouse line of the current invention with data obtained from another mouse or mouse line of the current invention.

[0037] A computational analysis, in certain embodiments, comprises a comparison of genomic data, sequence data, expression data, phenotypic data, behavioral data, and any other kind of data.

### 6.2 Mice of the Current Invention

[0038] The current invention provides, in certain embodiments, a mouse carrying an engineered genomic mutation and, in certain other embodiments, the current invention provides a mouse line of the mice of the current invention. A mouse of the current invention, in certain embodiments, may be a Homozygote, a Heterozygote, a Chimera, an Off-Spring or a Wild-Type.

[0039] A mouse of the current invention may be maintained, kept or stored, in certain embodiments, as a living animal, an ES cell, an egg, a fertilized egg, a gamete, a morula, a blastocyst, an embryo, an oocyte, a fetus, or a cell of any cell type or cell aggregate that is capable of generating a mouse. A mouse of the current invention may be stored, in certain embodiments, through cryopreservation. In certain embodiments, cryopreservation is not used to store a living animal. Methods for cryopreservation useful to store a mouse of the current invention are known in the art and are described, for example, in U.S. Pat. Nos. 5,962,213; 6,361,934; 6,500,608; 6,503,698; 6,519,954; and in Van den Abbeel et al., 1994, Cryobiology 31(5):423-33; Dumoulin et al., 1994, Fertil Steril. 62(4):793-8; Vasuthevan et al., 1992, J. Assist. Reprod. Genet. 9(6):545-50; Thornton et al., 1999, Mamm. Genome 10(10):987-92; Songsasen and Leibo, 1997, Cryobiology 35(3):255-69; Songsasen and Leibo, 1997, Cryobiology 35(3):240-54; Songsasen et al., 1997, Biol. Reprod. 56(1):143-52; Critser and Mobraaten, 2000, ILAR J. 41(4):197-206; Kasai and Mukaida, 2004, Reprod. Biomed. Online 9(2):164-170; Menezo, 2004, Obstet. Gynecol. Reprod. Biol. 115 Suppl 1:S12-5; Sztein et al., 2001, Cryobiology 42(1):28-39; Sztein et al., 1999, Lab.-Anim.-Sci. 49(1):99-100; Sztein et al., 1998, Biol.-Reprod. 58(4):1071-4, all of which are incorporated herein by reference for all purposes.

[0040] Table 1 shows examples of mice carrying engineered genomic mutations of the current invention. Table 1 also includes a description of the phenotype of a mouse carrying each of the engineered genomic mutations in Table 1.

[0041] Background on mice is also described in U.S. Patent Application Nos. 20020182724, 20040072243, 20040259253, 20050059060, 20050053953; and in U.S. Pat. Nos. 6,080,576; 6,136,566; 6,207,371; 6,218,123; 6,436,707; 6,776,988; 6,808,921; 6,855,545, all of which are incorporated herein by reference for all purposes.

### 6.3 Cells of the Current Invention

[0042] The current invention further includes, in certain embodiments, cells carrying an engineered genomic mutation. A cell of the current invention includes, in certain embodiments, a stem cell, an embryonic stem cell, a hematopoietic stem cell, a progenitor cell, a fibroblast, a nerve cell, a muscle cell, an epithelial cell, a teratocarcinoma cell, any other cell type known in the art, a cell that is progeny of one of the mentioned cell types, a cell that is derived from one of the mentioned cell types through differentiation.

[0043] A cell of the current invention may be obtained, in certain embodiments, by engineering a mutation into the genome of such a cell, for example, a stem cell or an embryonic stem cell. A cell of the current invention may also be obtained, in certain embodiments, from a mouse of the current invention, for example, from a Homozygote, a Heterozygote, an Off-Spring, a Chimera, or a Wild-Type. In certain other embodiments, a cell of the current invention is progeny of a cell obtained from a mouse of the current invention, for example, from a Homozygote, a Heterozygote, an Off-Spring, a Chimera, or a Wild-Type.

[0044] Background on cells is also described in U.S. Patent Application Nos. 20020182724, 20040072243, 20040259253, 20050059060, 20050053953; and in U.S. Pat. Nos. 6,080,576; 6,136,566; 6,207,371; 6,218,123; 6,436,707; 6,776,988; 6,808,921; 6,855,545, all of which are incorporated herein by reference for all purposes.

### 6.4 Polynucleotides of the Current Invention

[0045] The current invention provides, in certain embodiments, a polynucleotide. In certain embodiments, a polynucleotide of the current invention is derived from a cell or a mouse of the current invention. In certain other embodiments, a polynucleotide of the current invention comprises one, more than one, or all exons and/or one, more than one, or all introns of a gene that is found in a Wild-Type of a mouse line of the current invention and that carries an engineered genomic mutation in a Homozygote of the same mouse line, or its complementary, or a fragment thereof, or a polynucleotide capable of hybridizing thereto under conditions of moderate stringency or high stringency. A polynucleotide of the current invention, in certain embodiments, encodes a polypeptide of the current invention. A polynucleotide of the current invention may be DNA, RNA or any modification or derivative thereof. A polynucleotide may be genomic DNA, cDNA, hnRNA, mRNA, or any combination thereof. A polynucleotide of the current invention is at least 50 base pairs in length, or at least 100 base pairs, or at least 200 base pairs, or at least 300 base pairs, or at least 400 base pairs, or at least 500 base pairs, or at least 1000 base pairs, or at least 2000 base pairs, or at least 5000 base pairs, or at least 10000 base pairs, or at least 20000 base pairs in length.

[0046] The identification, isolation, cloning, modification and other processing of polynucleotides and conditions for hybridization under various conditions, including moderate and high stringency, are described in United States Patent Application Number 20050059060, which is incorporated herein for that and any other purpose.

### 6.5 Polypeptides of the Current Invention

[0047] The current invention provides, in certain embodiments, a polypeptide. In certain embodiments, a polypeptide of the current invention is derived from a cell or a mouse of the current invention. In certain other embodiments, a polypeptide of the current invention comprises a polypeptide that is encoded by one, more than one, or all exons of a gene that is found in a Wild-Type of a mouse line of the current invention and that carries an engineered genomic mutation in a Homozygote of the same mouse line, or a fragment thereof. In certain other embodiments, a polypeptide of the current invention is encoded by a polynucleotide of the current invention. A polypeptide of the current invention may comprise any one or more or all of the naturally occurring amino acids, or any modification or derivative thereof. A polypeptide of the current invention is at least 10 amino acids in length, or at least 25 amino acids, or at least 50 amino acids, or at least 100 amino acids, or at least 200 amino acids, or at least 300 amino acids, or at least 500 amino acids in length.

[0048] The identification, isolation, modification and other processing of polypeptides are described in United States Patent Application Number 20050059060, which is incorporated herein for that and any other purpose.

### 6.6 Antibodies of the Current Invention

[0049] The current invention also provides antibodies. In certain embodiments, an antibody of the present invention is specific to an antigen or epitope which is absent in a mouse of the invention (Absent Antigen). In certain preferred embodiments, an Absent Antigen is absent in a Homozygote of a mouse line of the invention, but not absent in a Wild-Type of the same mouse line. In certain other embodiments, an Absent Antigen is synthesized in a cell of a Wild-Type of a mouse line of the invention, but not in a Homozygote of the same mouse line. In certain embodiments, an Absent Antigen is expressed by a gene in a Wild-Type of a mouse line of the invention but not a Homozygote of the same mouse line. In certain other embodiments, an Absent Antigen is encoded by a gene in a Wild-Type of a mouse line of the invention but not a Homozygote of the same mouse line.

[0050] In certain other embodiments, an antibody of the invention is raised in a mouse of the invention, for example, a Wild-Type, a Chimera, an Off-Spring, a Heterozygote, and preferably a Homozygote. In certain other embodiments, an antibody of the current invention may be changed or altered into another antibody type. For example, a mouse antibody may be altered into a humanized antibody with the same antigen specificity, or any other type of alteration may be carried out. Antibody types contemplated under the current invention include, but are not limited to, polyclonal, monoclonal, multispecific, human, humanized or chimeric antibodies, single chain antibodies, Fab fragments, F(ab′) fragments, fragments produced by a Fab expression library, anti-idiotypic (anti-Id) antibodies (including, e.g., anti-Id antibodies to antibodies of the invention), and epitope-binding fragments of any of the above. In certain embodiments, an antibody of the current invention binds an Absent Antigen with a binding affinity (Kₐ) of 10⁶ M⁻¹ or greater, preferably 10⁷ M⁻¹ or greater, more preferably 10⁸ M⁻¹ or greater, more preferably 10⁹ M⁻¹ or greater, more preferably 1010 M⁻¹ or greater, more preferably 10¹¹ M⁻¹ or greater, and most preferably 10¹² M⁻¹ or greater.

[0051] Background on antibodies, antibody generation, characterization, modification, and uses are also described in U.S. Patent Application Nos. 20020182724, 20040072243, 20040259253, 20050059060, 20050053953; and in U.S. Pat. Nos. 6,080,576; 6,136,566; 6,207,371; 6,218,123; 6,436,707; 6,776,988; 6,808,921; 6,855,545; 6,824,780; 6,827,934; 6,824,993; 6,767,541; 6,828,425, all of which are incorporated herein by reference for all purposes.

### 6.7 Therapeutic Utility

[0052] The present invention provides, in certain embodiments, efficient drug development or development of therapies, or both. A mouse or a cell of the present invention may be used to obtain drugs and therapies for treatment of disease. An antibody of the present invention, in certain embodiments, may be used for therapeutic applications. Therapeutic applications, for example of antibodies of the invention, include disease phenotypes and phenotypic traits as those shown in Table 1.

[0053] Mice of the current invention may be useful in therapeutic strategies involving, in certain embodiments, the preparation of human antibodies raised in a mouse of the invention. Raising a human antibody in a mouse of the invention may be carried out as known to those of skill in the art, for example, by preparing xenomice from a mouse of the invention through replacement of parts of the mouse genome responsible for antibody production with equivalent parts of the human genome responsible for antibody production. Mice obtained using this technique may be used in deriving antibodies with particularly strong therapeutic utility. Background on how to prepare a mouse capable of raising human antibodies and on raising human antibodies in mice is also described in U.S. Pat. Nos. 5,939,598; 6,075,181; 6,114,598; 6,130,364; 6,150,584; 6,162,963; 6,458,592; 6,657,103; 6,673,986; 6,833,268, all of which are incorporated herein by reference for all purposes.

### 6.8 Diagnostic Utility

[0054] The present invention provides, in certain embodiments, diagnostic tools. For example, a mouse or a cell of the present invention may be used, in certain embodiments, to diagnose the effectiveness of drugs, antibodies, or small molecules. An antibody of the present invention may be used, for example, to diagnose the presence or quantity of an antigen or epitope that the antibody is specific for, or a disease condition associated with a phenotype found in the animal in which the antibody is raised.

[0055] The present invention is further illustrated by the following examples, which are not intended to be limiting in any way whatsoever.

### EXAMPLES

### Example 1

### Generation of a Library of Mutated Mouse ES Cells Defined By GTS Sequences

[0056] Retroviral vectors such as those exemplified and described in detail in U.S. Pat. Nos. 6,080,576, 6,136,566, 6,139,833 were used to generate a collection of gene trapped ES cell clones. Plasmids containing various VICTR cassettes described above were constructed by conventional cloning techniques. Usually, the cassettes contained a PGK promoter directing transcription of an exon that ends in a canonical splice donor sequence. The transcript encoding the exon was engineered to contain sequences that allow for the annealing of two nested PCR and sequencing primers. The vector backbone was based on pBluescript KS+ from Stratagene Corporation.

[0057] The plasmid construct was linearized by digestion with, for example, ScaI, which cuts at a unique site in the plasmid backbone. The plasmid was then transfected into the mouse ES cell line AB2.2 by electroporation using a BioRad Genepulser apparatus. After the cells were allowed to recover, gene trap clones were selected by adding puromycin to the medium at a final concentration of 3 μg/ml (other antibiotics, such as G418, were used at suitable concentrations as applicable). Positive clones were allowed to grow under selection for approximately 10 days before being removed and cultured separately for storage and to determine the sequence of the disrupted gene.

[0058] Total RNA was isolated from an aliquot of cells from each of 18 gene trap clones chosen for study. Five micrograms of this RNA was used in a first strand cDNA synthesis reaction using the “RS” primer. This primer has unique sequences (for subsequent PCR) on its 5′ end and nine random nucleotides or nine T (thymidine) residues on it's 3′ end. Reaction products from the first strand synthesis were added directly to a PCR with outer primers specific for the engineered sequences of puromycin and the “RS” primer. After amplification, aliquots of reaction products were subjected to a second round of amplification using primers internal, or nested, relative to the first set of PCR primers. This second amplification provided more reaction product for sequencing and also provided increased specificity for the specifically gene trapped DNA.

[0059] The products of the nested PCR were visualized by agarose gel electrophoresis, and seventeen of the eighteen clones provided at least one band that was visible on the gel with ethidium bromide staining. Most gave only a single band, which is an advantage in that a single band is generally easier to sequence. The PCR products were sequenced directly after excess PCR primers and nucleotides were removed by filtration in a spin column (Centricon-100, Amicon). DNA was added directly to dye terminator sequencing reactions (purchased from ABI) using the standard M13 forward primer, a region for which was built into the end of the puro exon in all of the PCR fragments.

[0060] Subsequent studies have used both VICTR 3, VICTR 20 and follow-on vectors. Like VICTR 3, VICTR 20 is exemplary of a broader family of vectors that incorporate two main functional units: a sequence acquisition component having a strong promoter element (phosphoglycerate kinase 1) active in ES cells that is fused to the puromycin resistance gene coding sequence that lacks a polyadenylation sequence but is followed by a synthetic consensus splice donor sequence (PGKpuroSD); and 2) a mutagenic component that incorporates a splice acceptor sequence fused to a selectable, calorimetric marker gene and followed by a polyadenylation sequence (for example, SAβgeopA or SAIRESβgeopA). Also like VICTR 3, stop codons have been engineered into all three reading frames in the region between the 3′ end of the selectable marker and the splice donor site.

[0061] When VICTRs 3, 20, and various variations and modifications thereof were used in the commercial scale application of the presently disclosed invention; many mutagenized ES cell clones were rapidly engineered and obtained. Sequence analysis obtained from these clones has identified a wide variety of both previously identified and novel sequences.

[0062] The cloned 3′ RACE products resulting after the target ES cells were infected with VICTR 20 were purified using conventional column chromatography (e.g., S300 and G-50 columns), and the products were recovered by centrifugation. Purified PCR products were quantified by fluorescence using PicoGreen (Molecular Probes, Inc., Eugene Oreg.) as per the manufacturer's instructions.

[0063] Dye terminator cycle sequencing reactions with AmpliTaq® FS DNA polymerase (Perkin Elmer Applied Biosystems, Foster City, Calif.) were carried out using approximately 7 pmoles of sequencing primer, and approximately 30-120 ng of 3′ template. Unincorporated dye terminators were removed from the completed sequencing reactions using G-50 columns as described above. The reactions were dried under vacuum, resuspended in loading buffer, and electrophoresed through a 6% Long Ranger acrylamide gel (FMC BioProducts, Rockland, Me.) on an ABI Prism® 377 with XL upgrade as per the manufacturer's instructions. The sequences of the resulting amplicons, or GTSs, were recorded.

### Example 2

### Transfecting ES Cells

[0064] a. Vector Construction

[0065] The promoter from the mouse phosphoglycerate kinase (PGK) gene was placed upstream from the first exon of the naturally occurring murine btk gene (nucleotides 40,043 to 40,250 of the murine btk gene). The first exon of the btk gene does not contain a translational start site and initiation codon marking the 5′ region of the coding sequence; however, these features could be engineered into the exon if desired. The 3′ end of the coding region of the first exon is marked by a splice donor sequence. Given that splice donor recognition sequences can extend into intronic sequence, 103 bases of intron DNA was retained after the end of the btk first exon. The PGKbtkSD cassette lacks a 3′ polyadenylation signal. Accordingly, any transcript produced by the cassette cannot be properly processed, and therefore identified by 3′ RACE, unless the transcript is spliced to a 3′ exon that can be polyadenylated.

[0066] The above 3′ gene trap cassette was placed into a retroviral vector (in reverse orientation relative to the flanking LTR regions) that incorporated a polyadenylation site 5′ to the PGK promoter of the 3′ gene trap cassette, the neo gene was placed 5′ to the polyadenylation site, and a splice acceptor (SA) site was placed 5′ to the neo coding region to produce a functional SAneopA, or optionally a SAIRESneopA 5′ gene trap cassette. This vector also incorporates, in operable combination, a pair of recombinase recognition sites that flank the PGKbtkSD cassette. This vector typically requires that the target cell naturally express the trapped gene; however, this requirement can be overcome by adding a promoter that independently controls the expression of the selectable marker.

[0067] b. 3′ Gene Trapping

[0068] The btk vector was introduced into the embryonic stem cells using standard techniques. In brief, supernatant from GP+E packaging cells was added to approximately 2×10⁶ embryonic stem cells (at an input ratio of approximately 0.1 virus/target cell) for 16 hours and the cells were subsequently selected with G418 for 10 days. G418 resistant cells were subsequently isolated, grown up on 96-well plates and subjected to automated RNA isolation, reverse transcription, PCR and sequencing protocols to obtain the gene trapped sequences.

[0069] RNA Isolation was carried out on DNA bind plates (Corning/Costar) treated with 5′-amino (dT)₄₂ (GenoSys Biotechnologies) in a 50 mM Sodium Phosphate buffer, pH 8.6, and allowed to sit at room temperature overnight. Immediately prior to use the plates were rinsed three times with PBS and twice with TE. Cells were rinsed with PBS, lysed with a solution containing 100 mM Tris-HCl, 500 mM LiCl, 10 mM EDTA, 1% LiDS, and 5 mM DTT in DEPC water, and transferred to the DNA binding plate where the mRNA was captured. After a 15 minute incubation the RNA was washed twice with a solution containing 10 mM Tris-HCl, 150 mM LiCl, 1 mM EDTA, and 0.1% LiDS in DEPC water. The RNA was then rinsed three times with the same solution minus LiDS. Elution buffer containing 2 mM EDTA in DEPC water was added and the plate was heated at 70° C. for five minutes. An RT premix containing 2× First Strand buffer, 100 mM Tris-HCl, pH 8.3, 150 mM KCl, 6 mM MgCl₂, 2 mM dNTPs, RNAGuard (1.5 units/reaction, Pharmacia), 20 mM DTT, QT primer (3 pmol/r×n, GenoSys Biotechnologies, sequence: 5′ CCAGTGAGCAGAGTGACGAGGACTCGAGCTCAAGCTTTTTTTTTTTTTTTTT 3′, SEQ ID NO: 1) and Superscript II enzyme (200 units/r×n, Life Technologies) was added. The plate was transferred to a thermal cycler for the RT reaction (37° C. for 5 min. 42° C. for 30 min. and 55° C. for 10 min).

### Example 3

### Genetic Analysis of ES Cell Colonies

[0070] The cDNA was amplified using two rounds of PCR. The PCR premix contains: 11×MGBII buffer (74 mM Tris pH 8.8, 18.3 mM Ammonium Sulfate, 7.4 mM MgCl₂, 5.5 mM 2ME, 0.011% Gelatin), 11.1% DMSO (Sigma), 1.67 mM dNTPS, Taq (5 units/r×n), water and primers. The sequences of the first round primers are: Pₒ 5′AAGCCCGGTGCCTGACTAGCTAG3′, SEQ ID NO: 2; BTKₒ 5′GAATATGTCTCCAGGTCCAGAG3′, SEQ ID NO: 3; and Qₒ 5′ CCAGTGAGCAGAGTGACGAGGAC3′, SEQ ID NO: 4 (pmol/r×n). The sequences of the second round primers are Pᵢ 5′CTAGCTAGGGAGCTCGTC3′, SEQ ID NO: 5; BTKᵢ 5′ CCAGAGTCTTCAGAGATCAAGTC3′, SEQ ID NO: 6; and Qᵢ 5′ GAGGACTCGAGCTCAAGC3′, SEQ ID NO: 7 (50 pmol/rxn). The outer premix was added to an aliquot of cDNA and run for 17 cycles (95° C. for 1 min. 94° C. for 30 sec., 58° C. for 30 sec 65° C. for 3.5 min). An aliquot of this product was added to the inner premix and cycled at the same temperatures 40 times.

[0071] The nested 3′ RACE products were purified in a 96-well microtiter plate format using a two-step protocol as follows. Twenty-five microliters of each PCR product was applied to a 0.25 ml bed of Sephacryl® S-300 (Pharmacia Biotech AB, Uppsala, Sweden) that was previously equilibrated with STE buffer (150 mM NaCl, 10 mM Tris-HCL, 1 mM EDTA, pH 8.0). The products were recovered by centrifugation at 1200×g for 5 minutes. This step removes unincorporated nucleotides, oligonucleotides, and primer-dimers. Next, the products were applied to a 0.25 ml bed of Sephadex® G-50 (DNA Grade, Pharmacia Biotech AB) that was equilibrated in MilliQ H₂O, and recovered by centrifugation as described earlier. Purified PCR products were quantified by fluorescence using PicoGreen (Molecular Probes, Inc., Eugene Oreg.) as per the manufacturer's instructions.

[0072] Dye terminator cycle sequencing reaction with AmpliTaq® FS DNA polymerase (Perkin Elmer Applied Biosystems, Foster City, Calif.) were carried out using 7 pmoles of primer (Oligonucleotide OBS; 5′CTGTAAAACGACGGCCAGTC3′, SEQ ID NO: 8) and approximately 30-120 ng of 3′ RACE product. The cycling profile was 35 cycles of 95° C. for 10 sec, 55° C. for 30 sec, and 60° C. for 2 min. Unincorporated dye terminators were removed from the completed sequencing reactions using G-50 columns as described earlier. The reactions were dried under vacuum, resuspending in loading buffer, and electrophoresed through a 6% Long Ranger acrylamide gel (FMC BioProducts, Rockland, Me.) on an ABI Prism® 377 with XL upgrade as per the manufacturer's instructions.

[0073] The automated 96-well format was used to obtain sequence, and data was obtained from 70% of the colonies. Upon examination, the sequence from the first exon of btk was identified followed by the btk splice junction. The splice junction was followed by unique sequences from each separate gene trap event. These sequences averaged 500 bp in length and were of high quality often containing long open reading frames. In addition 80% of these sequences can be matched using blast searches to sequences found in the GenBank database indicating that transcribed exonic sequences were identified. These gene trap sequence tags are of significantly better length and quality than those produced by previous gene trap designs. The new tags are improved in both length and quality and the fact that 80% of the tags match GenBank sequences suggests that they efficiently trap genes.

### Example 4

### Using ES Cells to Generate Mice

[0074] ES cells of the current invention are used to generate a mouse of the current invention. Any technique known in the art can be employed to generate a mouse with an ES cell. For example, an ES cell can be used to generate a mouse by injecting the cell into a blastocyst as described, for example, in Bradley, 1987. In: Teratocarcinomas and Embryonic Stem Cells: A Practical Approach, Robertson, ed. IRL, Oxford, pp. 113-152. Blastocysts can be isolated from a pregnant mouse on day 3.5 of pregnancy. About 20-25 ES cells are typically injected into a blastocyst. Following injection, the blastocyst is implanted into a suitable pseudopregnant female foster animal and the embryo brought to term. Progeny of the foster animal are used to breed more animals. If an ES cell harboring the engineered genomic mutation entered the germline of the foster animal's Off-Spring, the mutation will be represented in the Off-Spring's gene pool. Animals are bred to obtain a Homozygote, Heterozygote, Chimera, Off-Spring and/or Wild-Type animal. One may determine if an ES cell carrying an engineered genomic mutation of interest has entered the germline by observing the coat color of Off-Spring mice. As the ES cells are derived from an agouti coat color strain and the blastocyst from a black coat color strain, second or higher generation Off-Spring carrying agouti coat color would be indicative that an ES cell carrying the engineered genomic mutation has entered the germline. In addition, Off-Spring animals are examined genetically to detect the presence of the genetrap vector and to characterize the engineered genomic mutation.

[0075] Additional background on generating a mouse can also be found in, for example, Puhler, A., Ed., Genetic Engineering of Animals, VCH Publ., 1993; Murphy and Carter, Eds., Transgenesis Techniques Principles and Protocols (Methods in Molecular Biology, Vol. 18), 1993; and Pinkert, C A, Ed., Transgenic Animal Technology: A Laboratory Handbook, Academic Press, 1994. Transgenic mice may also be generated, for example, as described in Thomas et al. (1999) Immunol., 163:978-84; Kanakaraj et al. (1998) J. Exp. Med., 187:2073-9; or Yeh et al. (1997) Immunity 7:715-725; Jaenisch (1988) Science, 240:1468-1474.

### Example 5

### Phenotypic Analysis of Mice

[0076] Functional annotation of the mammalian genome in the post-genome era is an important task. Genetic studies in model organisms provide an approach for understanding gene function. Technologies for parallel production and analysis of mouse mutants provides a valuable screen through mutations in druggable genes to identify targets for drug discovery. By carrying out genetic screens in a mammalian model system, one can screen directly for changes in physiology relevant to disease treatment. This example describes a biological screen for analyzing large numbers of mouse lines, for example, for screening 1000 mouse gene knockouts per year. This screen is focused on discovering the targets for therapeutic products in the areas of metabolism, endocrinology, immunology, neurology, cardiology, ophthalmology, reproductive biology and oncology.

### 5.1 Introduction

[0077] Genetic screens can be used to scan a genome for genes that play a role in any process of interest. Genetic screens were carried out in invertebrate model organisms and included saturation screens of Drosophila Model Organisms in Drug Discovery. Ed. Pamela M. Carroll and Kevin Fitzgerald Copyright 2003 John Wiley & Sons, Ltd., to identify genes involved in organization of the body plan during development (Nusslein-Volhard and Wieschaus, 1980) and screens in Caenorhabditis elegans to identify genes involved in producing the invariant cell lineage pattern (Horvitz and Sulston, 1980; Chalfie et al., 1981; Hedgecock et al., 1983). These screens relied on saturation mutagenesis to interrogate the genome for the set of genes involved in these processes and led to the discovery of genes such as the homeobox genes and apoptosis regulators involved in development across all invertebrate and vertebrate species examined. Since these screens, additional genetic screens have been carried out in the fly and worm, further demonstrating the power of genetics for the dissection of pathways and processes. These screens require only a method for creating large numbers of tractable mutations in genes and a phenotype that can be measured.

[0078] Genetic screening has been adapted for the vertebrate model organisms of zebrafish and mice. In zebrafish, both chemical mutagenesis (Mullins et al., 1994; Haffter et al., 1996) and gene trapping (Golling et al., 2002) have been combined with phenotypic screens to identify mutations affecting development of the neural crest, pigmentation, jaw, branchial arches, visual system, heart and other internal organs, ear, retina, brain, midline, shape and movement (Brockerhoff et al., 1995; Abdelilah et al., 1996; Baier et al., 1996; Brand et al., 1996; Chen et al., 1996; Granato et al., 1996; Kelsh et al., 1996; Malicki et al., 1996a,b; Neuhauss et al., 1996; Odenthal et al., 1996; Piotrowski et al., 1996; Schier et al., 1996; Solnica-Krezel et al., 1996; Stemple et al., 1996). These screens take advantage of the large number of Off-Spring, oviparous development and transparent nature of the zebrafish embryo that make it a system for the study of vertebrate development that should result in the identification of genes involved in vertebrate development. For the purpose of drug discovery, effective genetic screens in mammals allow one to dissect mammalian physiology to identify key genes with therapeutic relevance as potential drug targets. Genetic screens in mammals are logistically possible with advances in mutagenesis and screening methods in mice that facilitate functional dissection of the mammalian genome. Advances in the scale and speed of gene targeting (Walke et al., 2001; Abuin et al., 2002) and the development of genome-wide gene trapping (Zambrowicz et al., 1998; Wiles et al., 2000; Leighton et al., 2001; Mitchell et al., 2001) in mouse embryonic stem cells resulted in mutations in a number of genes. The screen described in this example combines mouse screening methods with miniaturization of medical technologies and with disease challenge assays useful to the mouse model for diagnostic analysis of mice. The mouse is a model organism that is ideal for studying many aspects of mammalian physiology with direct medical relevance. Screens are used to identify genes involved in insulin sensitivity, hypertension, body fat deposition, energy expenditure, bone deposition and breakdown, angiogenesis and many other processes with significance for the treatment of disease.

[0079] These advances have brought together two aspects for genetic screens in mammals: the ability to produce large numbers of mutations and the ability to screen for phenotypes of interest. The development of mutagenesis strategies to mutate large numbers of mouse genes has been described (Zambrowicz et al., 1998; Wiles et al., 2000; Leighton et al., 2001; Mitchell et al., 2001). This example describes phenotypic screens designed to identify genes for use as targets to ameliorate diseases in the areas of diabetes/metabolism, cardiology, neurology, ophthalmology, reproductive biology, oncology and immunology/inflammation.

### 5.2 Saturating the Druggable Genome

[0080] One of the advantages of doing genetic screens in the mouse model system is the ability to measure directly the physiological parameters relevant to disease. These direct measures allow the identification of gene products that, when modulated by small-molecule drugs, provide a therapeutic effect. This approach is supported by the excellent correlation between the knock-out phenotypes of the targets of marketed pharmaceutical drugs and the known efficacy and side-effects of those drugs (Zambrowicz and Sands, 2003). An example is a knock-out of the H+/K+ ATPase: the target of drugs such as Prilosec™ (AstraZeneca) used to lower gastric acid secretion for the treatment of gastric ulcer disease. Knock-out of either the alpha or beta subunit of ATPase results in animals with neutral stomach pH—a phenotype that correlates with the action of the pharmacological antagonists of ATPase (Scarff et al., 1999; Spicer et al., 2000). Similarly, mammalian screens can be set up to identify the genes that play a role in any specified therapeutic area. For instance, if one is interested in genes that may be important for the treatment of diabetes, it is possible to screen mutations in mice for direct effects on blood glucose and insulin levels, insulin sensitivity and other parameters such as obesity that play an important role in the diabetic process. There are genes involved in the regulation of glucose homeostasis, for example, the insulin receptor, which when mutated in mice results in animals with severe insulin resistance and frank diabetes (Accili et al., 1996; Joshi et al., 1996). Likewise, if one is interested in genes important for the treatment of osteoporosis, one can screen for mutations that increase or decrease bone mineral density, as observed for mice with mutations of the cathepsin K (Saftig et al., 1998) and osteoprotegerin genes (Bucay et al., 1998; Mizuno et al., 1998), respectively. This genetic approach is useful to analyze the role of a gene within the mammalian organism and its medical relevance.

[0081] The ability to measure parameters of mammalian physiology by screening in a mammalian organism stands in contrast to attempts to identify genes with disease relevance in lower model organisms such as Drosophila. The Drosophila system is useful for defining genetic pathways because of the ability to perform saturation screens for genetic modifiers of phenotypes that have been established already; yet, these genetic screens often are designed artificially and are removed from mammalian physiology. For instance, primary phenotypes to be used for modifier screens often are developed based upon overexpression, ectopic expression or expression of dominant or activated forms of a gene known to be involved in disease in the Drosophila eye (Therrien et al., 2000; Hirose et al., 2001; LaJeunesse et al., 2001; Schreiber et al., 2002; Sullivan and Rubin, 2002). Screens then are used to identify modifier genes that ameliorate or exacerbate the eye phenotype originally produced. These screens are able to elucidate genetic pathways and the types of genes that might play a role in a pathway of interest, but the corresponding mammalian genes still must be identified and tested for any relevance to the original disease or physiology of interest.

[0082] Saturation screens for genetic modifiers in non-mammalian organisms can provide clues for finding genes that may play a role in a disease-relevant pathway, but carrying out genetic screens directly in mammals for those genes is a preferred approach as more relevant to disease or physiology of interest. The question is whether the ability to scan a genome using saturation mutagenesis in invertebrate organisms outweighs the ability to screen directly in a more focused manner for genes that modulate disease-relevant mammalian physiology. Two of the challenges of conducting genetic screens in the mouse mammalian model have centered on the issues of the speed at which tractable genetic mutations can be generated and the large number of genes that must be processed to provide broad genomic coverage. While saturation modifier screens in mice need logistical support, it is possible to create mutations in all members of the so-called druggable classes of genes through gene targeting and gene trapping. This creates an opportunity to saturate the druggable mammalian genome, which is an important milestone in the evolution of drug discovery in the post-genome era. These druggable genes include secreted proteins that could be biotherapeutics themselves, potential targets for antibody-based therapeutics and small-molecule drug targets that belong to gene families that have proved themselves to be amenable to small molecule modulation based upon marketed drugs (Hopkins and Groom, 2002). The druggable genes include GPCRs (G-protein coupled receptors), ion channels, nuclear hormone receptors, key enzymes, kinases, proteases, secreted proteins and cell surface proteins. Indeed, one could argue that all mammalian disease or disease treatment pathways of interest probably contain druggable genes, so that by mutating all the druggable genes in the genome one can interrogate all pathways for points of therapeutic intervention.

[0083] Gene knock-out technologies were implemented on a large scale for saturation of the druggable genome. A program was instituted to knock out and analyze the resulting phenotypes for 5000 genes from the mammalian genome. The 5000 genes chosen are all members of druggable gene families. It was suggested that the druggable genome may be as small as about 3000 genes (Hopkins and Groom, 2002); therefore, screening 5000 genes is believed to be sufficient to saturate the mammalian druggable genome in order to identify those genes that have the greatest potential for disease treatment.

### 5.3 Effectively Screening the Genome for Novel Drug Targets

[0084] When generating knock-out mouse lines at a rate of 1000 per year, one needs a biological evaluation process that has a high probability of identifying potential drug targets, as assessed by the physiological consequences of gene disruption. A process that maximizes the potential to identify therapeutically significant genes was developed.

[0085] This screening process applies filters for genomic information. First, the genome is examined for members of druggable families. Second, knock-out mice are generated for selected genes at an average rate of 20 lines of mutant mice per week. A minimum cohort for initial evaluation is 16 animals; 8 Homozygous nulls, 4 Heterozygotes and 4 Wild-Type animals for each gene. This cohort size has produced reliable data from the primary screen upon which decisions for secondary screens can be made. This process involves the integration of bioinformatics, mouse genetics, robotics and high-speed physiological evaluation in an infrastructure with the ability to operate at the required rate. Generating, maintaining, genotyping and characterizing the required number of animals is logistically feasible.

[0086] An initial biological evaluation of the animals is a comprehensive clinical assessment of physiological parameters that can be measured effectively in high-throughput mode. Each test has relevance to one or more therapeutic areas and is designed to yield information that can be correlated directly with therapeutic intervention. This process includes an extensive battery of behavioral evaluations (neurology), blood pressure and heart rate measurements (cardiology) and a complete hematology survey supplemented with fluorescence-activated cell sorting (FACS) scans for immune function (immunology). The animals also are evaluated for body fat content, lean body mass (metabolism), bone mineral density, bone mineral content (endocrinology) and retinal integrity/vascularization (ophthalmology). Effects on cell proliferation and reproductive organ development are studied (oncology) and fertility (reproductive biology) is assessed. This screening phase of biological investigation is referred to as Level 1 analysis.

[0087] This initial analysis of the physiological consequence of creating null mutations is designed to be unbiased with regard to potential outcome but to encompass phenotypes indicative of utility to our chosen therapeutic areas. All animals in all projects are submitted to the same tests in the same temporal sequence. This means that each test must be self-contained and have minimal impact on the outcome of subsequent tests. The aim of Level 1 analysis is to obtain a comprehensive understanding of gene function within the context of mammalian physiology. Variations from normal in any parameter are detected by comparison with cohort controls and with pooled historical data for all controls. Historical control data based on many animals give a good quantitative measure of normal values for each test and the level of background variation. Most of the tests are of primary importance to one particular therapeutic area (e.g. blood pressure and cardiology), but the total picture gained from this type of analysis is useful in identifying possible side-effects of target modulation. This allows the identification of targets with a potential for the development of target modulators.

[0088] In addition to therapeutic area-specific tests, multiple general diagnostic tests are performed. Level I pathology examines 52 tissues for the female and 53 tissues for the male. A complete gross necropsy is performed, with collection of tissues and photography of any significant gross lesions. Tissues are immersion-fixed in 10% neutral buffered formalin for 24 h, trimmed, processed to paraffin, embedded, sectioned at 4-5 mm, and stained with hematoxylin and eosin for histopathological examination. A board-certified pathologist examined tissues from one male and one female Homozygote for each project (Heterozygotes are examined for Homozygous lethal projects). Computer-assisted tomography (CAT) scanners operate effectively on mice and enable non-invasive evaluation of soft-tissue anatomy in addition to very refined skeletal analysis. Application of CAT (MicroCAT, ImTek Inc.) can be used to obtain morphological information non-invasively. All lesions are recorded and compared with controls in order to facilitate interpretation of phenotypes.

[0089] The output from all Level 1 tests is reduced to digital data and ported to a relational database. Data acquisition is rapid to the point that no Level 1 test is rate-limiting for the overall process. Numerical data is represented graphically with appropriate statistical tools, images are annotated by project scientists and interpretation of pharmaceutical relevance is summarized. It is therefore possible to gain a comprehensive view of the physiological function of every gene that is studied. This view encompasses those features that are most indicative of therapeutic potential in specific disease areas. Level 1 analysis has been a source of targets for drug discovery programs. Level 2 analysis entails the confirmation of Level 1 observations using additional animals and the application of specialized tests in a given project in reaction to Level 1 observations. Level 2 includes numerous therapeutic area-specific tests and challenge assays that cannot be used in the screening phase. Level 2 analysis may be triggered also through a hypothesis-driven approach. Level 3 analysis is designed for in-depth biological study in order to determine the merits of each target for assay development and high-throughput screening.

[0090] The decision to submit a given gene product to actual drug discovery is based on three criteria: modulation of the target by a small molecule, antibody or therapeutic protein could provide significant therapeutic effect with minimal or no discernable on-target side-effects; the target represents a potential breakthrough for the treatment of disease with significant advantages over existing therapies; and the program addresses a major unmet medical need. These criteria were applied to the analysis of multiple phenotypes and a number of projects were committed to further drug discovery following this analysis.

[0091] What follows is a brief description of the capabilities of the therapeutic area biology groups, including Level 1 and Level 2 tests that are most directly relevant to them.

### 5.4 High-Throughput Biology

### Maximizing Return from Reverse Genetics

[0092] 5.4.1 Endocrinology/metabolism

[0093] Three of the most prevalent diseases of endocrinology/metabolism are Type II diabetes, obesity and osteoporosis. A comprehensive panel of physiological tests was implemented for each disease process that have proved to provide reliable clinical descriptions of disease-related symptoms. These tests include measures of body composition index, glucose homeostasis and bone mass.

[0094] 5.4.1.1 Level 1 Diabetes Tests

[0095] 5.4.1.1.1 Glucose Tolerance Test

[0096] The glucose tolerance test (GTT) is the standard for defining impaired glucose homeostasis in mammals. For example, intraperitoneal glucose tolerance tests showed improved glucose clearance and the serum glucose and insulin levels were significantly lower in protein tyrosine phosphatase-1B (PTP-1B) and SHIP2 knock-out mice (Klaman et al., 2000; Clement et al., 2001). These findings indicate improved insulin sensitivity, a possibility that confirmed by hyperinsulinemic-euglycemic clamp studies in the PTP-1B knock-out mice (Klaman et al., 2000). These results suggest that these two proteins are targets for new therapeutics aimed at Type II diabetes. In addition, the ability of retinoid X receptor agonists to lower serum glucose and insulin levels is used as evidence that these agonists act as insulin sensitizers in vivo (Mukherjee et al., 1997). These examples validate the effectiveness of GTT for the identification of potential targets for diabetes. Glucose tolerance tests are performed using a Lifescan glucometer. Animals are injected i.p. with 2 g/kg D-glucose, delivered as a 20% solution, and blood glucose levels are measured at 0, 30, 60 and 90 min after injection (Klaman et al., 2000).

[0097] 5.4.1.1.2 Urinalysis

[0098] Elevated glucose and/or ketone levels in urine are diagnostic markers for diabetes. Qualitative urinalysis is performed using Chemstrip 10 UA reagent strips (Roche) for the detection of glucose, bilirubin, ketones, blood, pH, protein, urobilinogen, nitrites and leukocytes in urine. Results are recorded using a Chemstrip 101 urine analyser.

[0099] 5.4.1.1.3 Serum Insulin

[0100] Serum insulin levels are also diagnostic markers for diabetes. Insulin levels are assayed using a sensitive rat radioimmunoassay kit from Linco, which is sensitive to 0.02 ng/ml insulin in serum.

[0101] 5.4.1.2 Level 2 Diabetes Tests

[0102] In Level 2, other tests are performed to verify and further define the role of targets in glucose homeostasis, for example, insulin tolerance test; insulin levels during GTT; insulin clearance (serum c-peptide/insulin ratio); measurement of serum free fatty acids, glycerol, glucagon, leptin, corticosterone; insulin content of pancreatic islets (radioimmunoassay); immunohistochemical analysis of pancreas for insulin, glucagon, somatostatin and pancreatic polypeptide; muscle and liver pathology, including glycogen and lipid content; pharmacological evaluation of liver slices, isolated soleus muscle and adipocytes.

[0103] 5.4.1.3 Level 1 Obesity Tests

[0104] Animal weight and percent body fat are measured in Level 1 to identify obesity phenotypes.

[0105] 5.4.1.3.1 Body Weight

[0106] All mice are weighed at 2, 4, 6, 8 and 16 weeks of age.

[0107] 5.4.1.3.2 Dual-Energy X-Ray Absorptiometry

[0108] Dual-energy X-ray absorptiometry (DEXA) is used to identify increased total body fat in melanocortin-3 receptor knock-out mice (Butler et al., 2000) and decreased total body fat in melanin concentrating hormone 1 receptor knock-out mice; the latter observation was confirmed by direct analysis of fat pad weights (Marsh et al., 2002). Such results suggest these proteins as targets for novel obesity therapies. In addition, DEXA was used to show that the small-molecule insulin mimetic cpd2 blocks the accumulation of body fat in mice fed a high fat diet, an observation confirmed by direct analysis of fat pad weights (Air et al., 2002). A DEXA instrument (Lunar Piximus) is used to record bone mineral density, bone mineral content, percent body fat and total tissue mass (Nagy and Clair, 2000; Punyanitya et al., 2000). Although primarily aimed at metabolic and osteoporotic conditions, DEXA is a sensitive measure of all-round wellbeing and often contributes to diagnosis in other therapeutic areas.

[0109] 5.4.1.4 Level 2 Obesity Tests

[0110] In Level 2, obesity targets are analyzed to determine whether they regulate metabolism, feeding, appetite or food absorption. Level 2 obesity tests include, for example, metabolic cages to measure food intake, water intake and fat malabsorption; Mini-Mitter telemetry for physical activity, core body temperature, drinking frequency and feeding frequency and duration; Oxymax measurement of metabolic rate and physical activity; home cage diet studies, including high-fat-diet challenge, food intake measurement and pair-feeding studies; fat mass by DEXA or nuclear magnetic resonance (Bruker Minispec); body composition analysis (analysis of carcass fat mass by Sohxlet; fat pad and organ weights); crosses to ob/ob mice; pharmacological challenge with leptin, melanocortin II and neuropeptide Y; blood pressure.

[0111] 5.4.1.5 Level 1 Osteoporosis Tests

[0112] 5.4.1.5.1 Bone Microcomputed Tomography

[0113] Osteoporosis is characterized by a decreased bone mineral density due to a deficiency in bone production or increased bone absorption resulting in brittle bones. Specialized microcomputed tomography (micro-CT) machines have been developed with the capacity to provide quantitative and imaging data on the three-dimensional structure of mouse bones. This technique is used to demonstrate the efficacy of parathyroid hormone in a mouse model of osteoporosis (Alexander et al., 2001) and is used to describe in three dimensions the changes in bone resulting from the osteopetrotic mutation, which leads to osteopetrosis (Abe et al., 2000). A Scanco Medical mCT40 machine is used for measurements of bone mineral density. This machine permits visualization of trabecular bone structure, which is critical in evaluating overall bone quality. This is a much more sensitive analysis of bone than can be achieved using DEXA alone and is a specialized test for osteoporosis that we have implemented as part of our Level 1 analysis.

[0114] 5.4.1.6 Level 2 Osteoporosis Tests

[0115] In Level 2, targets are analyzed to determine whether changes in bone mineral density are due to effects on bone deposition or bone resorption using various tests, for example, DEXA; micro-CT; undecalcified bone histomorphometry; bone histopathology; measurement of urinary helical peptide.

[0116] 5.4.2 Cardiology

[0117] The major disease areas of interest in cardiology are hypertension, thrombosis, atherosclerosis and heart failure.

[0118] 5.4.2.1 Level 1 Tests

[0119] 5.4.2.1.1 Blood Pressure

[0120] Blood pressure measurements facilitate finding targets that, upon inhibition, lead to a reduction in blood pressure. Angiotensin-converting enzyme inhibitors and angiotensin receptor antagonists are effective drugs in the treatment of hypertension. Both knock-outs have low blood pressure. Blood pressure is measured using a non-invasive computerized tail-cuff system, the Visitech Systems BP-2000. This technique is a validated approach (Krege et al., 1995; Ito et al., 1995; Oliver et al., 1998; Sugiyama et al., 2001). Ten measurements of blood pressure are made per day on each of 4 days for each animal evaluated. Results are recorded as the pooled average of 40 measurements.

[0121] 5.4.2.1.2 Zymosan Challenge Assay

[0122] Peritoneal leukocyte recruitment assays are used to identify targets that may regulate the inflammatory component of atherosclerosis. These assays detect abnormalities in immune cell recruitment to a site of inflammation. It has been shown in mutant such as C-C chemokine receptor 2 (CCR2) knock-outs that a defect in immune cell recruitment in these assays correlates well with a significant reduction in the inflammatory component of atherosclerosis and the subsequent plaque formation (Boring et al., 1997).

[0123] 5.4.2.1.3 Blood Lipids

[0124] High cholesterol and triglyceride levels are recognized risk factors in the development of cardiovascular disease. Measuring blood lipids facilitates finding the biological switches that regulate blood lipid levels; inhibition of these switches should lead to a reduction in the risk for cardiovascular disease.

[0125] 5.4.2.1.4 Optic Fundus Photography and Angiography

[0126] Optic fundus photography is performed on conscious animals using a modified Kowa Genesis small-animal-fundus camera (Hawes et al., 1999). Intraperitoneal injection of fluorescein permits the acquisition of direct light fundus images and fluorescent angiograms for each examination. In addition to direct opthalmological changes, this test can detect retinal changes associated with systemic diseases such as diabetes and atherosclerosis.

[0127] 5.4.2.2 Level 2 Cardiology Tests

[0128] Level 2 cardiology tests include, for example, platelet aggregation; vascular injury by carotid cuff, chemically induced thrombosis; Poloxamer-induced atherosclerosis; aortic banding; permanent coronary occlusion; crosses with apolipoprotein E, low-density lipoprotein receptor and knock-outs.

[0129] 5.4.3 Immunology

[0130] Our focus indications include acute inflammation, inflammatory bowel disease, transplantation, asthma, allergy, multiple sclerosis, rheumatoid arthritis and blood coagulation. The process of hematopoietic cell development and the regulation of mature immune cell function share several key signaling pathways, which are the result of similar molecular or cellular interactions. As an example, activation events via the antigen-specific T-cell receptor and co-stimulatory molecules are indispensable for both normal T cell development in the thymus and normal T-cell function during an immune response. Comprehensive phenotypic analysis of functionally relevant immune cell subpopulations in knock-out mice is essential for two reasons: it can reveal the role of a novel gene or expose the central role of a known gene in immune cell development and function; and at the same time it can provide the first hint about the potential mechanism that can lead to the observed immune deficiency.

[0131] 5.4.3.1 Level 1 Tests

[0132] 5.4.3.1.1 Complete Blood Cell Count

[0133] Evaluation of the cellular components of the immune system in knock-out mice and Wild-Type littermates is performed by automated determination of the absolute numbers of various cell types and ratios in the peripheral blood, i.e. complete blood cell count (CBC). This analysis is followed by a more detailed study using flow cytometry, which is designed to determine the relative proportions of CD4+ and CD8+ T cells, B cells, NK cells and monocytes in the mononuclear cell population. In the absence of a single molecular entity, disturbances in the proportion of any of the analyzed cell types could signal a key role for that molecule in governing the immune system, as exemplified in the following knock-out phenotypes.

[0134] The immunosuppressants cyclosporin A and FK506, which are useful to prevent transplant rejection, inhibit the immune response by inhibiting the catalytic activity of one or both isoforms of calcineurin A (can) in lymphocytes. Mice deficient in the b-isoform of the enzyme have a significant reduction in peripheral T lymphocytes due to 75% and 65% reductions in CD4+ and CD8+ positive thymocytes, respectively (Bueno et al., 2002). Mice deficient in expression of granulocyte colony-stimulating factor (G-CSF) exhibit chronic neutropenia with a 70-80% reduction in circulating neutrophils, whereas recombinant GCSF (Neupogen) stimulates neutrophil production and is used to treat neutropenia (Lieschke et al., 1994).

[0135] This test requires 135 μl of whole blood and employs a Cell-Dyn 3500R hematology analyzer. It reports on white blood cell count, neutrophils, lymphocytes, monocytes, eosinophils, basophils, red blood cell count and other standard hematology markers.

[0136] 5.4.3.1.2 Blood Chemistry

[0137] A Cobas Integra 400 serum analyzer is used to measure a range of soluble serum components using approximately 85 ml of serum. Serum levels are recorded for alkaline phosphatase, albumin, total cholesterol, triglycerides, blood urea nitrogen, glucose, alanine aminotransferase, bilirubin, phosphate, creatinine, calcium and uric acid.

[0138] 5.4.3.1.3 Fluorescence-Activated Cell Sorting (FACS)

[0139] Flow cytometry is designed to determine the relative proportions of CD4+ and CD8+ T cells, B cells, NK cells and monocytes in the mononuclear cell population. A Becton-Dickinson FACSCalibur 3-laser FACS machine is used to assess immune status. For Level 1 screening, this machine records CD4+/CD8−, CD8+/CD4−, NK, B cell and monocyte numbers, in addition to the CD4+/CD8+ ratio.

[0140] 5.4.3.1.4 Ovalbumin Challenge

[0141] Chicken ovalbumin (OVA) is a T-cell-dependent antigen used as a model protein for studying antigen-specific immune responses in mice. It is non-toxic and inert and therefore will not cause harm to the animals even if no immune response is induced. The murine immune response to OVA has been well characterized, to the extent that the immunodominant peptides for eliciting T-cell responses have been identified. Anti-OVA antibodies are detectable 8-10 days after immunization using enzyme-linked immunosorbent assay, and determination of different isotypes of antibodies gives further information on the complex processes that may lead to a deficient response in genetically engineered mice.

[0142] The cyclosporin-mediated suppression of immune response once again demonstrates the similarity of phenotype using the suppressive agent or the genetic knock-out mice in this challenge model. Both cyclosporin-treated animals and mice knocked out for calcineurin A, in this case the a-isoform, show deficiency in T-cell-dependent antigen response (Puignero et al., 1995; Zhang et al., 1996).

[0143] Another example is the cytokine tumor necrosis factor a (TNF-a), whose important role in modulating inflammatory and antibody responses is well known. Two treatment options are available for patients with rheumatoid arthritis, a soluble receptor (Enbrel) and antibody (Remicade), both based on blocking the TNF-a activity. Underlining the effectiveness of drug therapy, mice deficient in TNF-a exhibit impaired humoral response to both T-cell dependent and T-cell-independent antigens (Pasparakis et al., 1996).

[0144] It is important to note that, even without antigenic challenge, the make-up of the immunoglobulin repertoire in a knock-out mouse is highly informative, because isotype switching of immunoglobulins is dependent on the interaction between B and T lymphocytes. Examples of the type of receptors required for normal function of T and B cells are the so-called co-stimulatory molecules, including CD28 and CD40 receptors, both of which are targets of antibody-based therapy with ongoing clinical trials for the treatment of various autoimmune diseases. In this case, mice deficient in either of these receptors register an impairment in immunoglobulin class switching, which is detectable in the serum of the animals (Shahinian et al., 1993, Kawabe et al., 1994). The protocol assesses the ability of mice to raise an antigen-specific immune response. Animals are injected i.p. with 50 mg of OVA emulsified in Complete Feund's Adjuvant; 8 days later the serum titer of anti-OVA antibodies (IgG1 and IgG2 subclasses) is measured.

[0145] 5.4.3.2 Level 2 Immunology Tests

[0146] The following Level 2 tests are used to test for disease indication for a given target, for example, T-Cell activation, CD3 monoclonal antibody (mAb)+CD28 mAb induced; B-Cell activation, CD40 mAb+IL4 induced; mixed lymphocyte reaction provoked by irradiated BALB/C spleen cells; lipopolysaccharide challenge to evaluate acute phase response; Oxazolone sensitization and challenge for contact hypersensitivity; ovalbumin vaccine model; bovine collagen-induced arthritis; dextran sulfate gavage: inflammatory bowel disease model; ovalbumin+alum immunization followed by aerosol delivery of ovalbumin as asthma model; allograft rejection; blood coagulation assays: prothrombin time and activated partial thromboplastin; platelet aggregation; bone marrow transplantation.

[0147] 5.4.4 Neurology

[0148] Neurology focuses on the identification of targets for anxiety, depression, schizophrenia, pain, sleep disorders, learning and memory disorders, neuromuscular disease and neurodegenerative disorders. The Level 1 assays have been based upon the behavioral phenotypes associated with knock-outs of known central nervous system targets as well as the actions of known drugs.

[0149] 5.4.4.1 Level 1 Tests

[0150] 5.4.4.1.1 Open Field Test

[0151] Several targets of known drugs have exhibited phenotypes in the open field test. These include knock-outs of the serotonin transporter, the dopamine transporter (Giros et al., 1996), and the GABA receptor (Homanics et al., 1997). An automated open-field assay is used to address changes related to affective state and exploratory patterns related to learning. First, the field (40×40 cm) is relatively large for a mouse, which is designed to pick up changes in locomotor activity associated with exploration. In addition, there are four holes in the floor to allow for nose-poking, an activity specifically related to exploration. Several factors have been designed to heighten the affective state associated with this test. The open-field test is the first experimental procedure in which the mice are tested, and the measurements taken are the subjects' first experience with the chamber. In addition, the open field is brightly lit. All these factors will heighten the natural anxiety associated with novel and open spaces. Thus, pattern and extent of exploratory activity, especially the center-to-total distance traveled ratio, may be able to discern changes related to susceptibility to anxiety or depression. A large arena (40 cm×40 cm, VersaMax animal activity monitoring system from AccuScan Instruments) with infrared beams at three different levels is used to record rearing, hole poke and locomotor activity. The animal is placed in the center and its activity is measured for 20 min. Data from this test are analyzed in five 4-min intervals. The total distance traveled (cm), vertical movement number (rearing), number of hole pokes and the center-to-total distance ratio are recorded.

[0152] 5.4.4.1.2 Inverted Screen

[0153] This test is used to measure motor strength/coordination. Untrained mice are placed individually on top of a square (7.5 cm×7.5 cm) wire screen that is mounted horizontally on a metal rod. The rod is rotated 180° so that the mice are on the bottom of the screens. The following behavioral responses are recorded over a 1-min testing session: fell off, did not climb and climbed up.

[0154] 5.4.4.1.3 Functional Observation Battery

[0155] This is a modified SHIRPA (Rogers et al., 2001) analysis in which the animals are scored systematically for 37 individual behavioral and physical characteristics, such as vision, response to touch, palpebral closure, etc. It is a formalization of the complete observation of the whole organism, which often gives the first hint as to phenotype.

[0156] 5.4.4.1.4 Hot Plate and Formalin Paw

[0157] The 55° C. hot plate is a standard assay for measuring nociception in animals. Knock-out of either the m-opioid receptor (Sora et al., 1997) or COX 1 (Ballou et al., 2000) (both targets of analgesic drugs) results in effects on response latency in the hot-plate assay. Analgesia, such as that produced by morphine and other strong analgesics, is also detected using this assay. The hot-plate test is carried out by placing each mouse on a small, enclosed 55° C. hot plate (Hot Plate Analgesia Meter, Columbus instruments). Latency to a hind-limb response (lick, shake or jump) is recorded, with a maximum time on the hot plate of 30 s. Each animal is tested once.

[0158] The formalin paw assay is useful for hyperalgesia, as well as initial acute nociception. Recently, this assay has been automated and thus has become available for use in high-throughput analysis. Drugs that address novel mechanisms of hyperalgesia, without the side-effects of potent non-steroidal anti-inflammatory drugs, will be very useful new therapeutics.

[0159] 5.4.4.1.5 Prepulse Inhibition

[0160] Prepulse inhibition is a pre-attentive process that has been shown to be deficient in patients with schizophrenia. This reduced ability to filter out environmental stimuli may contribute to both positive and negative symptoms of the disease. Antipsychotics can ameliorate some deficits in prepulse inhibition, therefore genetic inhibition of a target that can increase prepulse inhibition may presage a small-molecule therapeutic that can help patients with their disorder. The prepulse inhibition of the startle response assay is an automated measure of the startle response both with and without various intensities of prepulses. Targets whose genetic inhibition produces changes in prepulse inhibition without changes in the startle response itself may be excellent for the discovery of new therapeutics.

[0161] This test employs a San Diego Instruments SR-lab startle response system. Prepulse inhibition of the acoustic startle reflex occurs when a loud 120 decibel (dB) startle-inducing tone is preceded by a softer (prepulse) tone. The prepulse inhibition paradigm consists of six different trial types (70 dB background noise, 120 dB alone, 74+120 dB at postpartum day 4, 78+120 dB at postpartum day 8, 82+120 dB at postpartum day 12, and 90+120 dB at postpartum day 20) each repeated in pseudorandom order six times for a total of 36 trials. The maximum response to the stimulus (Vmax) is averaged for each trial type. The percentage inhibition of the animal's response to the startle stimulus is calculated for each prepulse intensity and then graphed. This test is being used increasingly as a model of human schizophrenia and a test for antipsychotic drugs.

[0162] 5.4.4.1.6 Tail Suspension

[0163] The tail-suspension and forced-swim assays are two assays for the discovery and validation of novel antidepressants. The knock-out of the noradrenaline transporter, one target of the antidepressant Welbutrin™, demonstrates an increased struggle time in the tail-suspension assay (Xu et al., 2000). The tail-suspension assay used is automated, giving it added objectivity and making it appropriate for high-throughput analysis. Both of these assays measure the efforts of the subject to extricate itself from an inescapable situation, i.e. they measure a tendency toward ‘giving up’. Compounds known to reduce depressive symptoms in patients reduce the immobility time in tail suspension, therefore gene knock-outs that result in decreased time spent being immobile, in the absence of any general increase in activity levels (as measured in assays such as the open field), indicate targets for the discovery of novel therapeutics for the treatment of depression. In this particular set-up (PHM-300 Tail Suspension Test Cubicle) a mouse is suspended by its tail for 6 min, and in response the mouse will struggle to escape from this position. Extended struggle is taken as antidepressive behavior, whereas curtailed struggle is interpreted as depressive.

[0164] 5.4.4.1.7 Circadian Rhythms

[0165] Changes in sleep patterns can be detected by examining activity continuously over a period of days and nights. An infrared beam system is used that monitors the horizontal locomotor activity of individual mice in their home cage environment for 3 days and nights. This facilitates obtaining an accurate indication of their sleep-wake cycle as well as overall locomotor activity rates. Changes in the normal circadian rhythm or an increase or decrease in the periods of activity during the normal sleep cycle indicates genes controlling sleep and indicates therapeutic utility for other conditions, such as depression or schizophrenia, in which normal sleep patterns are disrupted.

[0166] 5.4.4.1.8 Trace Aversive Conditioning

[0167] Cognition, especially the loss of cognitive abilities in dementias such as Alzheimer's disease, later-stage Parkinson's and Huntington's disease, as well as in schizophrenia, is a major focus for drug discovery. This area has been hampered particularly by the lack of rapid assays that specifically target the learning and memory losses associated with these diseases, i.e. learning and memory dependent on areas of the brain such as the hippocampus. Assays generally used, such as the eight-arm radial arm maze or delayed-nonmatching-to-sample procedures require significant time and training. However, animals learn aversive conditioning very easily and this can be combined with ‘trace’ conditioning, in which there is a time interval between the signal stimulus and the aversive stimulus itself, to provide a rapidly (3-5 trials) learned response that is dependent upon the function of the hippocampus. As with most of our other assays, this assay has been automated to increase objectivity and make it appropriate for high throughput behavioral analysis. Gene knock-outs that affect learning and memory in this assay, without changes in basic sensory or motor function, will indicate targets for new treatments for cognitive disorders.

[0168] 5.4.4.2 Level 2 Neurology Tests

[0169] Level 2 neurology tests include, for example, neurochemical analysis of dopamine, norepinephrine, serotonin and their primary metabolites in urine, blood, cerebrospinal fluid (CSF) and brain tissue; levels of melatonin and homocysteine in urine, blood, CSF and brain tissue; in situ hybridization/immunocytochemical analyses using Neo, LacZ or radioactivity; immunohistochemical analyses of markers of choice; pharmacological challenges in vivo; electroretinogram (vision); auditory brainstem response (hearing); detailed neuroanatomical/pathological analysis of brain, spinal cord, eye, ear and peripheral ganglia; field potential and whole-cell patch clamp in brain slices; whole-cell patch clamp of cultured neurons and other cells (HEK, etc.); fluorescence imaging of brain slices and cells; olfactory discrimination test (olfaction and social recognition); trace and delay aversive conditioning; social interaction and social recognition tests; zero maze (anxiety).

[0170] 5.4.5 Oncology

[0171] The targets of oncology therapeutics fall into three major categories: cytotoxic agents such as DNA damaging agents or inhibitors of tubulin or topoisomerase, tissue-specific growth regulators such as estrogen receptor blockers and leutinizing hormone blockers, and disease-specific antitumor agents such as Gleevec™, Herceptin™ and Rituxan™. The oncology Level 1 screen is directed at targets for cancer drugs that fall into the same categories operating through control points in mammalian cell cycle, apoptosis or response to DNA damage.

[0172] 5.4.5.1 Level 1 Tests

[0173] 5.4.5.1.1 Embyronic Lethality and Reduced Viability

[0174] Targets for cytotoxic agents are identified first by embryonic lethality or reduced viability. These phenotypes are examined further to determine effects on cell cycle, apoptosis and angiogensis.

[0175] 5.4.5.1.2 Tissue-Specific Growth Regulation

[0176] Targets affecting growth, differentiation and function of reproductive organs are examined through histopathologic survey of males, virgin females and lactating female mice.

[0177] 5.4.5.1.3 Cell Proliferation

[0178] Oncogene targets that have a direct effect on cell cycle, DNA repair or apoptosis can manifest their function through changes in adult skin fibroblast proliferation. Punch biopsies are taken of skin samples from the backs of mutant mice and cohort controls. These are developed into primary fibroblast cultures and the fibroblast proliferation rates are measured in a controlled protocol. The ability of this assay to detect hyperproliferative and hypoproliferative phenotypes has been demonstrated with p53 and Ku80.

[0179] 5.4.5.2 Level 2 Oncology Tests

[0180] Targets identified from Level 1 are characterized further for their role in mammalian tumorigenesis. Focus is placed on targets that are highly expressed in human tumor cell lines and capable of driving the tumor phenotype as demonstrated by gene knock-down studies or overexpression-driven tumorigenesis models in nude mice.

[0181] 5.4.5.2.1 Quantitative Polymerase Chain Reaction for Analysis of Expression in Cancerous and Normal Cell Lines and Tissues

[0182] Quantitative polymerase chain reaction of candidate genes is done using cDNA prepared from 66 cancer and nine normal cell lines from ATCC, seven primary cell strains from Clonetics, about three cancer lines and matched adjacent normal tissue controls from Ambion, MCF-7 breast cancer cells +/−17b-estradiol and LNCaP prostate cancer cells +/−dihydrotestosterone. This is done to identify targets that are overexpressed in cancerous cell lines relative to normal cell and tissue controls.

[0183] 5.4.5.2.2 Gene Knock-Down Studies with Short Interfering RNA

[0184] Cancer cell lines determined to be overexpressing a target of interest are cotransfected with 3-6 short hairpin RNA vectors and blasticidin resistance vectors or synthetic short interfering RNAs to knock down the expression of specific targets. Assessment is made of the effects of RNA interference on in vitro proliferation, anchorage-dependent and anchorage-independent colony formation and the ability of cell lines to form tumors in nude mice.

[0185] 5.4.5.2.3 Overexpression Studies for Putative Oncogenes

[0186] Oncology targets are tested to determine whether they can drive tumor formation. Full-length genes of interest are cloned into a mammalian expression vector and co-transfected into NIH3T3 and RK3E cells with a blasticidin-resistance vector. The resulting blasticidin-resistant polyclonal pools are tested in vitro for acquisition of anchorage independence, reduced serum dependence and increased focus-forming ability. Stably transfected cell lines expressing exogenous cDNAs of interest are then analyzed for their ability to form tumors in athymic nude mice.

### 5.5 Conclusions

[0187] Described here is a new conceptual framework for the discovery of drugs using the mammalian genome as a starting point in the analysis. The framework requires genetic antagonism of the drug target combined with a comprehensive in vivo physiological characterization of target function before any chemical screens for pharmaceutical agents are launched. This process constitutes a powerful genetic screen for the targets that allow for maximizing therapeutic effects while minimizing side-effects resulting from therapies modulating the target. In addition, determination of the role of the target in mammalian physiology enables identification of the medical indications for the therapeutics to be developed. Although this may appear an obvious prerequisite, it is important to note that many screens are conducted today against molecular targets for which the medical utility is either completely unknown or hypothesized based on only biochemical, gene expression or lower model organism data.

[0188] The mammalian genetic screen described here is engineered specifically to reveal those genes that encode control points in physiology useful in the treatment of major diseases. The tests described here measure important medical parameters of physiology that are associated with points of therapeutic intervention and medical needs. Additionally, the tests are robust in their application to thousands of animals.

[0189] The screen used to identify therapeutic targets can be applied again to demonstrate the efficacy and potential side-effects of candidate therapeutic agents. This broad phenotypic screen, guided by mammalian genetics, provides a new performance level for the preclinical testing of compounds that are developed to interact with chosen targets. The screen enables identification of the key biomarker indicators of efficacy that should be followed when a compound is at the first-time-in-mammal stage. The genetic tools available for preclinical studies include not only Wild-Type animals but also knock-outs and knock-ins containing the actual human gene targets. The knock-out animals provide guidance for determining the efficacy of novel therapeutic agents. Another powerful aspect of the preclinical testing capabilities includes the treatment of knock-out animals themselves with compounds specific for the target. In such a scenario any effects seen, outside those associated with the knock-out state, are, by definition, off-target side-effects attributable to the compound itself. The ability to manipulate the mouse genome at will provides a powerful tool to define accurately the on-target versus off-target side-effects produced by a given agent. Such new approaches are also very useful in combination with medicinal chemistry strategies to optimize therapeutic agents.

[0190] In the post-genome era, a systematic in vivo screen for targets is a precondition for high-throughput screening of small molecule therapeutics to identify the targets for treatments for disease.

### 5.6 References

[0191] Abdelilah, S., et al. (1996) Development 123, 217-227.
[0192] Abe, S., et al. (2000) Br. J. Radiol. 73, 1078-1082.
[0193] Abuin, A., et al. (2002) Trends Biotechnol. 20, 36-42.
[0194] Accili, D., et al. (1996) Nat. Genet. 12, 106-109.
[0195] Air, E. L., et al. (2002) Nat. Med. 8, 179-183.
[0196] Alexander, J. M., et al. (2001) J Bone Miner. Res. 16, 1665-1673.
[0197] Baier, H., et al. (1996) Development 123, 415-425.
[0198] Ballou, L. R., et al. (2000) Proc. Natl. Acad. Sci. USA 97, 10272-10276.
[0199] Boring, L., et al. (1997) J. Clin. Invest. 100, 2552-2561.
[0200] Brand, M., et al. (1996) Development 123, 129-142.
[0201] Brockerhoff, S. E., et al. (1995) Proc. Natl. Acad. Sci. USA 92, 10545-10549.
[0202] Bucay, N., et al. (1998) Genes Dev. 12, 1260-1268.
[0203] Bueno, O. F., et al. (2002) Proc. Natl. Acad. Sci. USA 99, 9398-9403.
[0204] Butler, A. A., et al. (2000) Endocrinology 141, 3518-3521.
[0205] Chalfie, M., et al. (1981) Cell 24, 59-69.
[0206] Chen, J. N., et al. (1996) Development 123, 293-302.
[0207] Clement, S., et al. (2001) Nature 409, 92-97.
[0208] Giros, B., et al. (1996) Nature 379, 606-612.
[0209] Golling, G., et al. (2002) Nat. Genet. 31, 135-140.
[0210] Granato, M., et al. (1996) Development 123, 399-413.
[0211] Haffter, P., et al. (1996) Development 123, 1-36.
[0212] Hawes, N. L., et al. (1999) Mol. Vis. 5, 22.
[0213] Hedgecock, E. M., et al. (1983) Science 220, 1277-1279.
[0214] Hirose, F., et al. (2001) Mol. Cell Biol. 21, 7231-7242.
[0215] Homanics, G. E., et al. (1997) Proc. Natl. Acad. Sci. USA 94, 4143-4148.
[0216] Hopkins, A. L. and Groom, C. R. (2002) Nat. Rev. Drug Discov. 1, 727-730.
[0217] Horvitz, H. R. and Sulston, J. E. (1980) Genetics 96, 435-454.
[0218] Ito, M., et al. (1995) Proc. Natl. Acad. Sci. USA 92, 3521-3525.
[0219] Joshi, R. L., et al. (1996) EMBO J. 15, 1542-1547.
[0220] Kawabe, T., et al. (1994) Immunity 1, 167-178.
[0221] Kelsh, R. N., et al. (1996) Development 123, 369-389.
[0222] Klaman, L. D., et al. (2000) Mol. Cell Biol. 20, 5479-5489.
[0223] Krege, J. H., et al. (1995) Hypertension 25, 1111-1115.
[0224] LaJeunesse, D. R., et al. (2001) Genetics 158, 667-679.
[0225] Leighton, P. A., et al. (2001) Nature 410, 174-179.
[0226] Lieschke, G. J., et al. (1994) Blood 84, 1737-1746.
[0227] Malicki, J., et al. (1996a) Development 123, 263-273.
[0228] Malicki, J., et al. (1996b) Development 123, 275-283.
[0229] Marsh, D. J., et al. (2002) Proc. Natl. Acad. Sci. USA 99, 3240-3245.
[0230] Mitchell, K. J., et al. (2001) Nat. Genet. 28, 241-249.
[0231] Mizuno, A., et al. (1998) Biochem. Biophys. Res. Commun. 247, 610-615.
[0232] Mukherjee, R., et al. (1997) Nature 386, 407-410.
[0233] Mullins, M. C., et al. (1994) Curr. Biol. 4, 189-202.
[0234] Nagy, T. R. and Clair, A. L. (2000) Obes. Res. 8, 392-398.
[0235] Neuhauss, S. C., et al. (1996) Development 123, 357-367.
[0236] Nusslein-Volhard, C. and Wieschaus, E. (1980) Nature 287, 795-801.
[0237] Odenthal, J., et al. (1996) Development 123, 103-115.
[0238] Oliver, P. M., et al. (1998) Proc. Natl. Acad. Sci. USA 95, 2547-2551.
[0239] Pasparakis, M., et al. (1996) J. Exp. Med. 184, 1397-1411.
[0240] Piotrowski, T., et al. (1996) Development 123, 345-356.
[0241] Puignero, V., et al. (1995) Int. Arch. Allergy Immunol. 108, 142-147.
[0242] Punyanitya, M., et al. (2000) FASEB J. 14, 497.
[0243] Rogers, D., et al. (2001) Neurosci. Lett. 306, 89-92.
[0244] Saftig, P., et al. (1998) Proc. Natl. Acad. Sci. USA 95, 13453-13458.
[0245] Scarff, K. L., et al. (1999) Gastroenterology 117, 605-618.
[0246] Schier, A. F., et al. (1996) Development 123, 165-178.
[0247] Schreiber, S. L., et al. (2002) Genesis 33, 141-152.
[0248] Shahinian, A., et al. (1993) Science 261, 609-612.
[0249] Solnica-Krezel, L., et al. (1996) Development 123, 67-80.
[0250] Sora, I., et al. (1997) Proc. Natl. Acad. Sci. USA 94, 1544-1549.
[0251] Spicer, Z., et al. (2000) J. Biol. Chem. 275, 21555-21565.
[0252] Stemple, D. L., et al. (1996) Development 123, 117-128.
[0253] Sugiyama, F., et al. (2001) Genomics 71, 70-77.
[0254] Sullivan, K. M. and Rubin, G. M. (2002) Genetics 161, 183-193.
[0255] Therrien, M., et al. (2000) Genetics 156, 1231-1242.
[0256] Walke, D. W., et al. (2001) Curr. Opin. Biotechnol. 12, 626-631.
[0257] Wiles, M. V., et al. (2000) Nat. Genet. 24, 13-14.
[0258] Xu, F., et al. (2000) Nat. Neurosci. 3, 465-471.
[0259] Zambrowicz, B. P. and Sands, A. T. (2003) Nat. Rev. Drug Discov. 2, 38-51.
[0260] Zambrowicz, B. P., et al. (1998) Nature 392, 608-611.
[0261] Zhang, B. W., et al. (1996) J. Exp. Med. 183, 413-420. 278.

### Example 6

### A Mouse Library with 68 Distinct Mouse Mutants

[0262] A mouse library of 68 distinct mouse mutants or mouse lines was generated. The following table (Table 1) describes the vector used to generate each line. Each vector is a gene trap vector that may integrate into a gene in the mouse genome and result in a gene transcript comprising vector sequences and exon sequences from the gene. The polynucleotide sequences referenced in Table 1, and disclosed in the appended Sequence Listing, were obtained by sequencing transcripts that include sequences of the gene trap vector. Table 1 also provides phenotypic data of each mouse line.

TABLE 1

| Line | | SEQ | |
|---|---|---|---|
| No. | Vector: | ID: | Phenotype: |
| 1. | VICTR48 | 9 | Mutation of the gene encoding the ortholog of human calcium |
| | | | channel, voltage-dependent, gamma subunit 8 (CACNG8) resulted |
| | | | in a hyperactive response in (−/−) mice. Transcript was absent in |
| | | | testis and greatly reduced in brain as determined by RT-PCR. |
| 2. | VICTR48 | 10 | Mutation of the gene encoding the ortholog of human RIO kinase |
| | | | 3 (yeast) (RIOK3) resulted in impaired learning/memory in (−/−) |
| | | | mice. Female (−/−) mice exhibited an increased skin fibroblast |
| | | | proliferation rate. Transcript was absent by RT-PCR. |
| 3. | VICTR48 | 11 | Mutation of the gene encoding the ortholog of a human |
| | | | hypothetical semaphorin (FLJ12287) resulted in severe retinal |
| | | | degeneration in (−/−) mice. Transcript was absent by RT-PCR. |
| 4. | VICTR48 | 12 | Mutation of the gene encoding the ortholog of human farnesyl |
| | | | diphosphate synthase (FDPS) resulted in lethality of (−/−) mutants. |
| | | | Increased bone-related measurements were noted in (+/−) mice. |
| 5. | VICTR48 | 13 | Mutation of the gene encoding the ortholog of human FAST |
| | | | kinase (FASTK) resulted in increased percentages of CD4 and |
| | | | CD8 cells in (−/−) mice. A decreased percentage of B cells was |
| | | | also noted in (−/−) mice. Transcript was absent by RT-PCR. |
| 6. | VICTR48 | 14 | Mutation of the gene encoding the ortholog of a human orphan G- |
| | | | protein coupled receptor resulted in decreased volumetric bone |
| | | | mineral density in (−/−) mice. Transcript was absent by RT-PCR. |
| 7. | VICTR48 | 15 | Mutation of the gene encoding the ortholog of human cornichon |
| | | | homolog (Drosophila) (CNIH) resulted in a decreased anxiety− |
| | | | related response in male (−/−) mice. Male (−/−) mice also exhibited |
| | | | decreased body weight, total tissue mass, and lean body mass. |
| | | | Transcript was absent by RT-PCR. |
| 8. | VICTR48 | 16 | Mutation of the gene encoding the ortholog of human hypothetical |
| | | | protein MGC15429 (MGC15429) resulted in a decreased pain |
| | | | response in (−/−) mice. Male (−/−) mice exhibited increased serum |
| | | | insulin, impaired glucose tolerance, and increased total body fat. |
| | | | Transcript was absent by RT-PCR. |
| 9. | VICTR48 | 17 | Mutation of the gene encoding the ortholog of human |
| | | | folylpolyglutamyl synthetase (FPGS) resulted in lethality of (−/−) |
| | | | mutants. Female (+/−) mice exhibited increased serum insulin |
| | | | levels, and male (+/−) mice exhibited decreased vertebral |
| | | | trabecular bone measurements. |
| 10. | VICTR48 | 18 | Mutation of the gene encoding the ortholog of human hypothetical |
| | | | protein ET (ET) resulted in a decreased anxiety-like response and |
| | | | impaired learning/memory in female (−/−) mice. Transcript was |
| | | | absent by RT-PCR. |
| 11. | VICTR48 | 19 | Mutation of the gene encoding the ortholog of a human |
| | | | hypothetical protein (KIAA1274) resulted in a decreased mean |
| | | | serum triglyceride level and an increased MCP-1 response to LPS |
| | | | challenge in (−/−) mice. Transcript was absent by RT-PCR. |
| 12. | VICTR48 | 20 | Mutation of the gene encoding the ortholog of human debranching |
| | | | enzyme homolog 1 (S. cerevisiae) (DBR1) resulted in lethality of |
| | | | (−/−) mutants. The (+/−) mice exhibited increased MCP-1 and IL-6 |
| | | | responses to LPS challenge. Female (+/−) mice also exhibited a |
| | | | decreased skin fibroblast proliferation rate. |
| 13. | VICTR48 | 21 | Mutation of the gene encoding the ortholog of human |
| | | | pseudouridine synthase 1 (PUS1) resulted in a decreased pain |
| | | | response in female (−/−) mice. The (−/−) mice also exhibited |
| | | | increased serum IgG1 and IgG2a responses to ovalbumin |
| | | | challenge. Transcript was absent by RT-PCR. |
| 14. | VICTR48 | 22 | Mutation of the gene encoding the ortholog of human sirtuin |
| | | | (silent mating type information regulation 2 homolog) 4 (SIRT4) |
| | | | resulted in enhanced learning/memory and increased tear |
| | | | production in male (−/−) mice. The (−/−) mice also exhibited |
| | | | numerous immunological abnormalities. Transcript was absent by |
| | | | RT-PCR. |
| 15. | VICTR48 | 23 | Mutation of the gene encoding the ortholog of human |
| | | | chromosome 6 open reading frame 1 (C6orfl) resulted in |
| | | | enhanced learning/memory in male (−/−) mice. Transcript was |
| | | | absent by RT-PCR. |
| 16. | VICTR48 | 24 | Mutation of the gene encoding the ortholog of human protease |
| | | | inhibitor 16 (PI16) resulted in immunological abnormalities in (−/−) |
| | | | mice. Transcript was absent by RT-PCR. |
| 17. | VICTR48 | 25 | Mutation of the gene encoding the ortholog of human SMAD |
| | | | specific E3 ubiquitin protein ligase 2 (SMURF2) resulted in a |
| | | | decreased pain response and an increased blood urea nitrogen |
| | | | level in (−/−) mice. Transcript was absent by RT-PCR. |
| 18. | VICTR48 | 26 | Mutation of the gene encoding a hypothetical membrane protein |
| | | | resulted in an abnormal exploratory response in (−/−) mice. Male |
| | | | (−/−) mice also exhibited an increased anxiety-related response. |
| | | | Transcript was absent by RT-PCR. |
| 19. | VICTR48 | 27 | Mutation of the gene encoding the ortholog of human ATP- |
| | | | binding cassette, sub-family F (GCN20), member 2 (ABCF2) |
| | | | resulted in increased TNF-alpha and IL-6 responses to LPS |
| | | | challenge in (−/−) mice. Transcript was absent by RT-PCR. |
| 20. | VICTR48 | 28 | Mutation of the gene encoding the ortholog of human |
| | | | prolylcarboxypeptidase (angiotensinase C) (PRCP) resulted in |
| | | | impaired sensorimotor gating/attention in (−/−) mice. Transcript |
| | | | was absent by RT-PCR. |
| 21. | VICTR48 | 29 | Mutation of the gene encoding the ortholog of human TatD DNase |
| | | | domain containing 1 (TATDN1) resulted in greatly reduced |
| | | | viability of (−/−) mice. The surviving (−/−) mice exhibited an |
| | | | increased serum uric acid level. The male (−/−) mouse was small |
| | | | and exhibited altered sensitivity to novelty-induced stress/anxiety. |
| | | | Female (−/−) mice exhibited enhanced learning/memory. |
| 22. | VICTR37 | 30 | Mutation of the gene encoding the ortholog of human |
| | | | “uncharacterized hematopoietic stem/progenitor cells protein |
| | | | MDS028” (MDS028) resulted in immunological abnormalities. |
| | | | Transcript was absent by RT-PCR. |
| 23. | VICTR37 | 31 | Mutation of the gene encoding the ortholog of human 3- |
| | | | hydroxyisobutyrate dehydrogenase (HIBADH) resulted in |
| | | | enhanced motor coordination in (−/−) mice. The (−/−) mice also |
| | | | exhibited an increased IL-6 response and a decreased TNF-alpha |
| | | | response to LPS challenge. Transcript was reduced as determined |
| | | | by RT-PCR. |
| 24. | VICTR48 | 32 | Mutation of the gene encoding the ortholog of human WAP four- |
| | | | disulfide core domain 3 (WFDC3) resulted in enhanced motor |
| | | | coordination in (−/−) mice. Transcript was absent by RT-PCR. |
| 25. | VICTR48 | 33 | Mutation of the gene encoding the ortholog of human lysosomal |
| | | | apyrase-like 1 (LYSAL1) resulted in an abnormal circadian |
| | | | rhythms response in (−/−) mice. Male (−/−) mice were smaller than |
| | | | their littermates. Transcript was absent by RT-PCR. |
| 26. | VICTR48 | 34 | Mutation of the gene encoding the ortholog of human |
| | | | angiopoietin-like 4 (ANGPTL4) resulted in decreased cholesterol |
| | | | and triglyceride levels in (−/−) mice. Transcript was absent by |
| | | | RT-PCR. |
| 27. | VICTR48 | 35 | Mutation of the gene encoding the ortholog of human interleukin 6 |
| | | | receptor, alpha (IL6R) resulted in a decreased anxiety-like |
| | | | response and a decreased pain response in male (−/−) mice. |
| | | | Transcript was absent by RT-PCR. |
| 28. | VICTR48 | 36 | Mutation of the gene encoding the ortholog of human mannan- |
| | | | binding lectin serine protease 2 (MASP2) resulted in increased |
| | | | serum IgG1, IgG2a, and IgG2b levels in (−/−) mice. Transcript was |
| | | | absent by RT-PCR. |
| 29. | VICTR48 | 37 | Mutation of the gene encoding the ortholog of human |
| | | | myotubularin related protein 3 (MTMR3) resulted in increased |
| | | | alkaline phosphatase levels in (−/−) mice. Male (−/−) mice exhibited |
| | | | impaired glucose tolerance. Transcript was absent by RT-PCR. |
| 30. | VICTR37 | 38 | Mutation of the gene encoding the ortholog of human FK506 |
| | | | binding protein 4 (FKBP4) resulted in infertility and some external |
| | | | feminization in male (−/−) mice. The (−/−) mice also exhibited |
| | | | increased serum alkaline phosphatase levels, and female (−/−) mice |
| | | | exhibited decreased intraocular pressure. Transcript was absent |
| | | | by RT-PCR. |
| 31. | VICTR37 | 39 | Mutation of the gene encoding the ortholog of a human |
| | | | hypothetical protein (KIAA0534) resulted in a decreased |
| | | | depressive-like response in (−/−) mice. Transcript was absent in |
| | | | spleen and reduced in kidney as determined by RT-PCR. |
| 32. | VICTR37 | 40 | Mutation of the gene encoding the ortholog of human tousled-like |
| | | | kinase 2 (TLK2) resulted in greatly reduced viability of (−/−) |
| | | | mutants. The 2 surviving (−/−) mice were small and exhibited |
| | | | impaired sensorimotor gating/attention, decreased body |
| | | | temperatures, and signs of anemia. |
| 33. | VICTR37 | 41 | Mutation of the gene encoding the ortholog of human histone |
| | | | deacetylase 4 (HDAC4) resulted in a decreased pain response and |
| | | | enhanced motor coordination in (−/−) mice. Female (−/−) mice |
| | | | exhibited decreased mammary epithelial cell proliferation. |
| | | | Transcript was absent by RT-PCR. |
| 34. | VICTR37 | 42 | Mutation of the gene encoding YME1-like 1 (YME1L1) resulted |
| | | | in reduced viability of (−/−) mice. Numerous abnormalities were |
| | | | observed in surviving (−/−) embryos, including smaller blood |
| | | | vessels and skeletal muscles. Neurological and optic |
| | | | abnormalities, along with decreased total tissue mass, were noted |
| | | | in surviving (−/−) animals. Decreased bone mineral density and |
| | | | content, and percent total body fat, were noted in male (−/−) mice. |
| | | | Transcript was absent by RT-PCR. |
| 35. | VICTR48 | 43 | Mutation of the gene encoding the ortholog of human degenerative |
| | | | spermatocyte homolog, lipid desaturase (Drosophila) (DECS) |
| | | | resulted in growth retardation, tremors, and numerous blood |
| | | | chemistry and hematology abnormalities in (−/−) mice. Transcript |
| | | | was absent by RT-PCR. |
| 36. | VICTR48 | 44 | Mutation of the gene encoding the ortholog of human endothelial |
| | | | cell-specific adhesion molecule (ESAM) resulted in an increased |
| | | | anxiety-related response in male (−/−) mice. Transcript was absent |
| | | | by RT-PCR. |
| 37. | VICTR37 | 45 | Mutation of the gene encoding the ortholog of human solute |
| | | | carrier family 20, member 2 (SLC20A2) resulted in cataracts in |
| | | | the (−/−) mice. One of 3 transcript splice variants was absent and 2 |
| | | | of 3 were reduced as determined by RT-PCR. |
| 38. | VICTR48 | 46 | Mutation of the gene encoding the ortholog of human cartilage |
| | | | acidic protein 1 (CRTAC1) resulted in a decreased exploratory |
| | | | response in (−/−) mice. Male (−/−) mice also exhibited an increased |
| | | | anxiety-like response. In addition, the (−/−) mice exhibited an |
| | | | increased inflammatory response, an increased percentage of CD8 |
| | | | cells, and a decreased percentage of B cells. Transcript was absent |
| | | | by RT-PCR. |
| 39. | VICTR37 | 47 | Mutation of the gene encoding the ortholog of human exonuclease |
| | | | 1 (EXO1) resulted in increased serum cholesterol levels in (−/−) |
| | | | mice. Transcript was absent by RT-PCR. |
| 40. | VICTR48 | 48 | Mutation of the gene encoding the ortholog of human UDP-N- |
| | | | acetyl-alpha-D-galactosamine: (N-acetylneuraminyl)-galactosyl-N- |
| | | | acetylglucosaminylpolypeptide-beta-1,4-N- |
| | | | acetylgalactosaminyltransferase (GALGT2) resulted in increased |
| | | | serum creatinine and uric acid levels in (−/−) mice. Transcript was |
| | | | absent by RT-PCR. |
| 41. | VICTR37 | 49 | Mutation of the gene encoding the ortholog of a human |
| | | | hypothetical protein resulted in an increased pain response in (−/−) |
| | | | mice. Transcript was absent by RT-PCR. |
| 42. | VICTR48 | 50 | Mutation of the gene encoding the ortholog of human heparanase |
| | | | (HPSE) resulted in an altered distribution of leukocyte subsets in |
| | | | the peripheral blood of (−/−) mice. Transcript was absent by |
| | | | RT-PCR. |
| 43. | VICTR48 | 51 | Mutation of the gene encoding the ortholog of human PI-3-kinase- |
| | | | related kinase SMG-1 (SMG1) resulted in lethality of (−/−) |
| | | | mutants. The (+/−) mice exhibited decreased white blood cell and |
| | | | absolute lymphocyte counts. |
| 44. | VICTR48 | 52 | Mutation of the gene encoding the ortholog of human UDP-N- |
| | | | acetyl-alpha-D-galactosamine: (N-acetylneuraminyl)-galactosyl-N- |
| | | | acetylglucosaminylpolypeptide-beta-1,4-N- |
| | | | acetylgalactosaminyltransferase (GALGT2) resulted in increased |
| | | | serum creatinine and uric acid levels in (−/−) mice. Transcript was |
| | | | absent by RT-PCR. |
| 45. | VICTR37 | 53 | Mutation of the gene encoding the ortholog of human rabaptin 5 |
| | | | (RAB5EP) resulted in increased IL-6 and TNF-alpha responses to |
| | | | LPS challenge in (−/−) mice. Transcript was absent by RT-PCR. |
| 46. | VICTR37 | 54 | Mutation of the gene encoding the ortholog of human glutamyl- |
| | | | prolyl-tRNA synthetase (EPRS) resulted in lethality of the (−/−) |
| | | | mutants. Female (+/−) mice exhibited a decreased skin fibroblast |
| | | | proliferation rate. |
| 47. | VICTR37 | 55 | Mutation of the gene encoding the ortholog of human ubiquitin |
| | | | protein ligase E3C (UBE3C) resulted in impaired |
| | | | learning/memory and a decreased skin fibroblast proliferation rate |
| | | | in female (−/−) mice. Male (−/−) mice exhibited decreased |
| | | | gastrocnemius muscle mass. Transcript level was greatly reduced |
| | | | as determined by RT-PCR. |
| 48. | VICTR48 | 56 | Mutation of the gene encoding the ortholog of human solute |
| | | | carrier family 39 (metal ion transporter), member 11 (SLC39A11) |
| | | | resulted in an increased anxiety-related response in male (−/−) |
| | | | mice. Transcript was absent by RT-PCR. |
| 49. | VICTR48 | 57 | Mutation of the gene encoding the ortholog of human RIO kinase |
| | | | 3 (yeast) (RIOK3) resulted in impaired learning/memory in (−/−) |
| | | | mice. Female (−/−) mice exhibited an increased skin fibroblast |
| | | | proliferation rate. Transcript was absent by RT-PCR. |
| 50. | VICTR37 | 58 | Mutation of the gene encoding the ortholog of human tripartite |
| | | | motif protein 24 (TRIM24) resulted in increased serum alanine |
| | | | aminotransferase and total bilirubin levels and immunological |
| | | | abnormalities in (−/−) mice. The (−/−) mice also exhibited |
| | | | decreased total body fat and enhanced motor coordination. Male |
| | | | (−/−) mice were small and exhibited decreased tear production and |
| | | | impaired learning/memory. Transcript was absent by RT-PCR. |
| 51. | VICTR48 | 59 | Mutation of the gene encoding the ortholog of human solute |
| | | | carrier family 4, sodium bicarbonate transporter-like, member 11 |
| | | | (SLC4A11) resulted in impaired sensorimotor gating/attention in |
| | | | (−/−) mice. The (−/−) mice also exhibited increased heart rates, |
| | | | more notably in males. Transcript was absent by RT-PCR. |
| 52. | VICTR48 | 60 | Mutation of the gene encoding the ortholog of human Ras-like |
| | MTII | | without CAAX 2 (RIT2) resulted in an abnormal circadian |
| | | | rhythms reponse in (−/−) mice. Transcript was greatly reduced as |
| | | | determined by RT-PCR. |
| 53. | VICTR48 | 61 | Mutation of the gene encoding the ortholog of human solute |
| | MTII | | carrier family 4, sodium bicarbonate cotransporter, member 5 |
| | | | (SLC4A5) resulted in degeneration and areas of depigmentation in |
| | | | the retina of (−/−) mice. Transcript was absent by RT-PCR. |
| 54. | VICTR48 | 62 | Mutation of the gene encoding the ortholog of human serine (or |
| | MTII | | cysteine) peptidase inhibitor, clade E, member 2 (SERPINE2) |
| | | | resulted in an increased skin fibroblast proliferation rate and |
| | | | decreased systolic blood pressure in female (−/−) mice. Transcript |
| | | | was absent by RT-PCR. |
| 55. | VICTR48 | 63 | Mutation of the gene encoding calpain 3 (CAPN3) resulted in high |
| | MTII | | retinal arteriolar light reflex in (−/−) mice. An upward trend in |
| | | | white blood cell counts, including increases in monocytes, |
| | | | lymphocytes, eosinophils and basophils, was observed in (+/−) and |
| | | | (−/−) mice. Transcript was absent by RT-PCR. |
| 56. | VICTR48 | 64 | Mutation of the gene encoding the ortholog of human |
| | MTII | | phosphoinositide−3−kinase, catalytic, delta polypeptide (PIK3CD) |
| | | | resulted in increased white blood cell and lymphocyte counts in |
| | | | (−/−) mice. The (−/−) mice also exhibited a decreased IgG1 response |
| | | | to ovalbumin challenge. Transcript was absent by RT-PCR. |
| 57. | VICTR48 | 65 | Mutation of the gene encoding the ortholog of human low density |
| | MTII | | lipoprotein receptor-related protein 5 (LRP5) resulted in |
| | | | radiological and ophthalmological abnormalities in (−/−) mice. |
| | | | Transcript was absent by RT-PCR. |
| 58. | VICTR48 | 66 | Mutation of the gene encoding the ortholog of human protein |
| | MTII | | tyrosine phosphatase, non-receptor type 21 (PTPN21) resulted in |
| | | | bilateral microphthalmia, retinal dysgenesis, and an increased |
| | | | serum IgG2a response to ovalbumin challenge in (−/−) mice. The |
| | | | non-albino (−/−) mice also exhibited signs of retinal degeneration. |
| | | | Transcript was absent by RT-PCR. |
| 59. | VICTR48 | 67 | Mutation of the gene encoding the ortholog of human |
| | | | diacylglycerol kinase, beta 90 kDa (DGKB) resulted in decreased |
| | | | serum triglyceride levels in (−/−) mice. Transcript was absent by |
| | | | RT-PCR. |
| 60. | VICTR48 | 68 | Mutation of the gene encoding the ortholog of human tissue |
| | | | specific transplantation antigen P35B (TSTA3) resulted in small, |
| | | | sickly, and dehydrated (−/−) mice that were analyzed early and did |
| | | | not undergo complete analysis. The (−/−) mice exhibited |
| | | | immunological and blood chemistry abnormalities, neutrophilia, |
| | | | increased myeloid cells in the bone marrow, and hematopoiesis in |
| | | | the spleen. Transcript was absent by RT-PCR. |
| 61. | VICTR48 | 69 | Mutation of the gene encoding the ortholog of human fatty acid |
| | | | desaturase 2 (FADS2) resulted in increased total white blood cell |
| | | | and absolute lymphocyte counts in (−/−) mice. Transcript was |
| | | | absent by RT-PCR. |
| 62. | VICTR48 | 70 | Mutation of the gene encoding the ortholog of human Ly-6 |
| | | | neurotoxin-like protein 1 (LYNX1) resulted in a decreased |
| | | | percentage of B cells in (−/−) mice. Male (−/−) mice exhibited a |
| | | | decreased fasting serum glucose level. Transcript was absent by |
| | | | RT-PCR. |
| 63. | VICTR48 | 71 | Mutation of the gene encoding the ortholog of a human |
| | | | hypothetical enzyme resulted in anemia and immunological |
| | | | abnormalities in (−/−) mice. The (−/−) and (+/−) mice also exhibited |
| | | | increased bone mineral measurements. Male (−/−) mice exhibited |
| | | | enhanced glucose tolerance. Transcript was absent by RT-PCR. |
| 64. | VICTR48 | 72 | Mutation of the gene encoding the ortholog of human metastasis |
| | | | associated 1 (MTA1) resulted in neurological, ophthalmological, |
| | | | and hematological abnormalities in (−/−) mice. Transcript was |
| | | | absent by RT-PCR. |
| 65. | VICTR48 | 73 | Mutation of the gene encoding the ortholog of human lysyl |
| | | | oxidase-like 1 (LOXL1) resulted in a decreased sICAM |
| | | | level in (−/−) mice. Male (−/−) mice also exhibited decreased |
| | | | vertebral trabecular bone measurements and increased serum |
| | | | alkaline phosphatase levels. Transcript was absent by RT-PCR. |
| 66. | VICTR48 | 74 | Mutation of the gene encoding the ortholog of a hypothetical |
| | | | human protein (DKFZP586B1621) resulted in impaired |
| | | | learning/memory in female (−/−) mice. Transcript was absent by |
| | | | RT-PCR. |
| 67. | VICTR48 | 75 | Mutation of the gene encoding the ortholog of human O-linked |
| | | | mannose beta1,2-N-acetylglucosaminyltransferase (FLJ20277) |
| | | | resulted in retinal degeneration, slight growth retardation, |
| | | | increased percentages of CD4 and CD8 cells, and a decreased |
| | | | percentage of B cells in (−/−) mice. Male (−/−) mice also exhibited |
| | | | decreased vertebral trabecular bone measurements and decreased |
| | | | femoral cortical thickness. Transcript was absent by RT-PCR. |
| 68. | VICTR48 | 76 | Mutation of the gene encoding the ortholog of human TAFA1 |
| | | | resulted in impaired motor coordination in (−/−) mice. The 2 |
| | | | transcripts were absent in lung and reduced in spinal cord as |
| | | | determined by RT-PCR. |

[0263] The polynucleotide sequences referenced in Table 1 were used to search the Genbank database to identify mouse polynucleotide sequences by accession numbers (Mouse Nucleotide Accession Nos.) that represent the full length transcript corresponding to the gene carrying the engineered mutation in each mouse line of Table 1. Also obtained were the corresponding polypeptide sequences by accession numbers (Mouse Protein Accession Nos.). Also obtained were the human polynucleotide (Human Nucleotide Accession Nos.) and polypeptide sequences (Human Protein Accession Nos.) that correspond to the mouse sequences. The Genbank accession numbers for all four types of sequences are shown below in Table 2 for each of the 68 mouse lines.

TABLE 2

| Line | Mouse Nucleotide | Mouse Protein | Human Nucleotide | Human Protein |
|---|---|---|---|---|
| No. | Accession Nos.: | Accession Nos.: | Accession Nos.: | Accession Nos.: |
| 1. | AF361350 | AAL50045 | AF288388 | AAK15019 |
| 2. | NM_024182 | Q8CIC1 | NM_003831 | O14730 |
| 3. | NM_013658 | Q62178 | NM_022367 | Q9H3S1 |
| 4. | NM_134469 | NP_608219 | NM_002004 | NP_001995 |
| 5. | NM_023229 | NP_075718 | NM_025096 | NP_079372 |
| 6. | XM_485685 | XP_485685 | NM_198827 | Q6QNK2 |
| 7. | NM_009919 | O35372 | NM_005776 | O95406 |
| 8. | NM_029631 | NP_083907 | NM_032750 | NP_116139 |
| 9. | NM_010236 | P48760 | NM_004957 | Q05932 |
| 10. | NM_178620 | Q8BJ51 | NM_024311 | Q9NXI5 |
| 11. | NM_013753 | P70261 | NM_014431 | NP_055246 |
| 12. | NM_031403 | NP_113580 | NM_016216 | Q96GH0 |
| 13. | NM_001025562 | Q9WU56 | NM_025215 | :Q9Y606 |
| 14. | BC022653 | XP_485674 | NM_012240 | Q9Y6E7 |
| 15. | NM_001002895 | Q8R043 | NM_178508 | Q86T20 |
| 16. | NM_023734 | Q9ET66 | NM_153370 | Q8NBK0 |
| 17. | NM_025481 | Q9CSE3 | NM_022739 | Q9HAU4 |
| 18. | NM_198635 | Q8BIM1 | N/A | N/A |
| 19. | NM_013853 | Q99LE6 | NM_005692 | Q96TE8 |
| 20. | NM_028243 | Q3TLW3 | NM_005040 | P42785 |
| 21. | NM_175151 | Q8BY37 | NM_032026 | Q9BY40 |
| 22. | NM_133927 | NP_598688 | NM_018463 | NP_060933 |
| 23. | NM_145567 | NP_663542 | NM_152740 | NP_689953 |
| 24. | XM_355365 | XP_355635 | NM_080614 | Q8IUB2 |
| 25. | NM_026174 | NP_080450 | NM_004901 | NP_004892 |
| 26. | U85089 | NP_064297 | AF276920 | NP_036605 |
| 27. | NM_010559 | P22272 | NM_000565 | PO8887 |
| 28. | AB009459 | CAB65250 | NM_006610 | NP_006601 |
| 29. | NM_028860 | Q5NCA1 | NM_021090 | Q13615 |
| 30. | NM_010219 | AAH03447 | NM_002014 | AAA36111 |
| 31. | BC030872 | IPI00136872 | AB011106 | Q9H4V1 |
| 32. | NM_011903 | P70320 | NM_006852 | N/A |
| 33. | NM_207225 | Q6NZM9 | NM_006037 | P56524 |
| 34. | NM_013771 | AAH07128 | BC007795 | AAK57555 |
| 35. | NM_007853 | NP_031879 | NM_003676 | NP_003667 |
| 36. | NM_027102 | Q925F2 | NM_138961 | Q96AP7 |
| 37. | AF196476 | Q9ES96 | NM_006749 | Q08357 |
| 38. | NM_145123 | NP_660105 | AJ421515 | CAD13394 |
| 39. | NM_012012 | Q9QZ11 | NM_006027 | Q9UQ84 |
| 40. | NM_008081 | Q09199 | NM_153446 | Q8NHY0 |
| 41. | NM_025998 | Q9D0Q6 | NM_024522 | Q9H9M7 |
| 42. | NM_152803 | Q6YGZ1 | NM_006665 | Q9Y251 |
| 43. | AK052331 | BAC34941 | NM_015092 | NP_055907 |
| 44. | NM_008081 | Q09199 | NM_153446 | Q8NHY0 |
| 45. | NM_019400 | NP_062273 | NM_004703 | NP_004694 |
| 46. | N/A | XP_129647 | NM_004446 | Q5H9S5 |
| 47. | NM_133907 | Q80U95 | NM_014671 | Q15386 |
| 48. | NM_027216 | NP_081492 | NM_139177 | NP_631916 |
| 49. | NM_024182 | Q9DBU3 | NM_003831 | O14730 |
| 50. | NM_145076 | Q64127 | NM_003852 | O15164 |
| 51. | XM_194050 | IPI00131702 | NM_032034 | Q8NBS3 |
| 52. | NM_009065 | NP_033091 | NM_002930 | NP_002921 |
| 53. | XM_132642 | XP_132642 | NM_033323 | Q9BY07 |
| 54. | NM_009255 | Q07235 | NM_006216 | P07093 |
| 55. | NM_007601 | AAD28255 | NM_000070 | AAD28253 |
| 56. | NM_008840 | NP_032866 | NM_005026 | NP_005017 |
| 57. | NM_008513 | NP_032539 | NM_002335 | NP_002326 |
| 58. | NM_011877 | Q62136 | NM_007039 | Q16825 |
| 59. | NM_178681 | Q6NS52 | NM_004080 | Q9Y6T7 |
| 60. | NM_031201 | NP_112478 | NM_003313 | NP_003304 |
| 61. | NM_019699 | Q9Z0R9 | NM_004265 | O95864 |
| 62. | NM_011838 | NP_035968 | NM_177457 | NP_803252 |
| 63. | AK019987 | Q8R116 | NM_178493 | Q8N410 |
| 64. | NM_054081 | NP_473422 | NM_004689 | NP_004680 |
| 65. | NM_010729 | P97873 | NM_005576 | Q08397 |
| 66. | NM_145496 | Q8VC30 | NM_015533 | Q3LXA3 |
| 67. | NM_026651 | Q91X88 | NM_017739 | Q8WZA1 |
| 68. | NM_182808 | Q7TPG8 | AL713702 | Q7Z5A9 |

### Example 7

### Polynucleotides Sequences Obtained from Hybrid Transcripts

[0264] Gene trap vectors of the current invention were introduced into ES cells. A selection protocol was employed to identify cells with a copy of a gene trap vector integrated into their genome. Hybrid transcripts were identified and isolated from the cells following selection for sequencing of non-vector sequences included in those hybrid transcripts, i.e., sequences from the mouse genome and trapped in the hybrid transcript (trapped sequences). These assays were carried our as discussed herein and in United States Patent Application Number 20050059060, which is incorporated herein for that and any other purpose. Each trapped sequence obtained is believed to represents at least a part of a gene or an entire gene that is expressed in ES cells and/or other cell types. Thus, each trapped sequence is believed to be a sequence tag or sequence identifier to identify a gene in a mouse, or another species that is sufficiently closely related to mouse. Trapped sequences are shown in SEQ ID NOS. 77 to 2549.

[0265] The present invention is not to be limited in scope by the specific embodiments described herein, which are intended as single illustrations of individual aspects of the invention, and functionally equivalent methods and components are within the scope of the invention. Indeed, various modifications of the invention, in addition to those shown and described herein, will become apparent to those skilled in the art from the foregoing description. Such modifications are intended to fall within the scope of the appended claims. All cited publications, patents, and patent applications are herein incorporated by reference in their entirety for any purpose.

1-4. (canceled)

7. A transgenic mouse whose genome comprises a disruption of a and wherein said disruption results in a phenotype that differs form the phenotype of a wild-type mouse, said gene selected from the group consisting of a gene comprising SEQ ID NO: 10, wherein the disruption of the gene comprising SEQ ID NO: 10 results in impaired learning/memory in (−/−) mice.

The application's sequence listing, which the Patent Office published only in electronic form, follows.

SEQUENCE LISTING (2549 sequences)

SEQ ID NO: 1 - DNA, 52 bp, Homo sapiens
ccagtgagcagagtgacgaggactcgagctcaagcttttttttttttttttt

SEQ ID NO: 2 - DNA, 23 bp, Homo sapiens
aagcccggtgcctgactagctag

SEQ ID NO: 3 - DNA, 22 bp, Homo sapiens
gaatatgtctccaggtccagag

SEQ ID NO: 4 - DNA, 23 bp, Homo sapiens
ccagtgagcagagtgacgaggac

SEQ ID NO: 5 - DNA, 18 bp, Homo sapiens
ctagctagggagctcgtc

SEQ ID NO: 6 - DNA, 23 bp, Homo sapiens
ccagagtcttcagagatcaagtc

SEQ ID NO: 7 - DNA, 18 bp, Homo sapiens
gaggactcgagctcaagc

SEQ ID NO: 8 - DNA, 20 bp, Homo sapiens
ctgtaaaacgacggccagtc

SEQ ID NO: 9 - DNA, 656 bp, Homo sapiens
  misc_feature (1)...(656): n = A,T,C or G
tatggcttcactctgcaccttcgcctctgcagccacctgctcgctgcccccggccccctctggccccttgaggccccccagcttctgcctgtgctgtgatccccccagccgccggcacggccccgcctccgctgccccggtggtggcccacggccccccggttgccagtggtgaaactggagtcattgaaacgctggaatgaagagaggggtttgtggtgtgaaaagggcgttcaggtactactgaccaccatcggcgccttcgcggcttttggcctcatgaccatcgccatcagcactgactactggctctacacaagagctctcatctgcaacaccaccaacctcacagcaggtgatgacggaccaccccatcgtgggggcagtggctcctccgagaagaaggaccctgggggcctcacacattcaggcctctggcggatatgctgcctggaaggtagggtgcaggaaggccctggctggccacctccgntgaagcctgtgcctncagcaaatcgacttntagtgttctgagtctcaacccaaggncttgaggggtgtgctttactgctggaggcggntnattccatgcacccctccatncctntntacaaatccctcttctggggattntngntgttatttttattttctttg

SEQ ID NO: 10 - DNA, 634 bp, Homo sapiens
  misc_feature (1)...(634): n = A,T,C or G
tgagtgcccatgggctacccctcaaanacagtatcctgttcctgaccgaggtgatgagtgaggagctggctaaagagctgcagttggaagaagaagcggctgctttccctgaagttgtgnacgtnacacagcacacagctcttgctgnaacccatnttnacngtctgactgnngactgtnattatacntnnacaaaagggcncactcagncatgctnangaacannttangcgtgaggnaaagaagtttcancnggtgatagcaaagtttccatttcgtttgaaaactatcgcaaagttcatccttttgaagacagtgacagctctgaagacnaggttgactggcaggacactcgagacgatccctacagaccagcaaagccaattcctactcccaaaaagggttttattggaaaaggaaaagacatcaccaccaagcatgatgaagtagtatgtggaagaaagaacacaccaagaatggaaaattttgcccttggctttcangtaggggatggaattggaatggatttgaaactatccaaccacgtttttaatgccttaaaacaacacgcctactcagaagagcgtcggagcgcccgtntncacgagaagaaggaacattctacccgctgaaa

SEQ ID NO: 11 - DNA, 621 bp, Homo sapiens
  misc_feature (1)...(621): n = A,T,C or G
atgctcctggggcccctcctctgncaangccttganccttcatgtaagtaccattttctgatggatgagcacgtggtaggaacacccctgctggtgaagtctggtgtggagtacacacngcttgctgtggagtcagctcggggccttgatgggagcagccatgtggtcatgtatctgggtacctccacggggtccctgcacaaggctgtggtgcctcaggacagcagtgcttatctcgtggaggagattcagctgagccctgactctgagcctgttcgaaacctgcagctggcccccgcccagggtgcagtgtttgcaggcttctctggaggcatctggagagttcccagggccaattgcagtgtctacnagagctgtgtggactgtgtgcttgccagggaccctcactgtgcctgggaccctgaatcaanactctgcagccttctgtctggctctaccaagccttggaagcaggacatggaacgcggcaacccggagtgggtatgcacccgtggccccatggccaggagcccccggcgtcagagcccccctcaactaattaaagaagtcctgacagtccccaactccatcctggagctgccctgcccccacctgtcagcg

SEQ ID NO: 12 - DNA, 616 bp, Homo sapiens
  misc_feature (1)...(616): n = A,T,C or G
actttagctcctctgtcagnatgaatgggaaccagcaattggctgcttataaccaagaaaagcagaatttcatccagcacttctcccagatcgtcaaggtgctgactgagaaggagctgggacacccagagataggggatgctattgcccggctcaaggaggtcctagagtacaatgccttaggaggcaagtacaaccggggtttgaccgtggtacaagccttccaggagctggtggagccgaagaaacaggatgctgagagtcttcagcgggccctgacagtgggctggtgtgtagaactgctccaggctttcttccttgtgtcagatgacatcatggactcttccctcactcgccggggacagatntgctggtatcagaagccaggcataggcttggatgccatcaacgacgctctgcttctggaagcctccatctatcgtttgctgaagttctactgcagggagcagccctactacctgaacctgctggagctctttctgcagagttcctatcagacagagatcgggcagactctagacctcatgacagcaccccagggccatgtggatcttggtagatacactgaaaagaggtacaaatcgattgtcaagga

SEQ ID NO: 13 - DNA, 608 bp, Homo sapiens
  misc_feature (1)...(608): n = A,T,C or G
tgcttcgaatcctgctctctgcccagcacttcccctgctcggctgtctggtttgctgctcatcccaccagtacagccctgttgtttgggacccagcaagtccggggaccggccttttggaggaggccctgtgcaaggccttcaacggcttctggaacaggcacggagccctggggagctactgcgatggctgagccagaaccccaccaaggtgcgagctcatcactaccctgtggcactccggcgtctgggccagctcttggtgtctcagcctaggccctctcctgtggagcaggccacactgcaggacttgagtcagctcatcatccgaaactgcccctcctttgacgttcacaccatccatgtgtgtctccaccttgcagtgttacttggcnanganngaaatggaacgctcctgtgtgccctcgagcaggagcgcaggncccgtctccctccaangccaccctccccacatcggcctgccatctatggnggtcaaaggttgnaagtggccctgagctgcccccgtttnctgcagnaccctngtnagcatctgatcagaagcntggcagaggcaaggccagaagaactgactcctcacgtaatggg

SEQ ID NO: 14 - DNA, 598 bp, Homo sapiens
  misc_feature (1)...(598): n = A,T,C or G
accgtctcttcctgtattgcgccttccttaacttcagctcacacatggacaccaggtggcgctgtcgtccatcagttacgttggctgctctctgtcagttctctgcctggctgccaccctggtcaccttcgcagtactgtcttctgtcagcaccattcggaaccagcgttaccacantccacgccaacctgtccttcgctgtcctggtagcccaggtcttgctgctgatcagcttcagcatggagcctggcacggtcccgtgccaggtgctggctgtcctcctacattacttcttcctgaccgcctttgcttggatgctggtggagggactacatctctacagcatntgtgataaaggtcttcggctcagaggacagcaagcacctctactactatgggataggctgggggtgccctctcctcatctgcatcatctccatatcatcctctatggacagctatgggacaagtgacagctgctggctggctctggggagtggcgctatttgggcctttgtgggcccggctctgttggtcattggaggtcaacattgttatcctggttgctgtgacgagggtcatctcccacatcagcacg

SEQ ID NO: 15 - DNA, 589 bp, Homo sapiens
  misc_feature (1)...(589): n = A,T,C or G
tagcatttgatgagctgaagaccgactacaagaaccctatagaccagtgcaataccctgaaccctcttgtccttccagagtacctcatccacgcgttcttctgtgtcatgtttctctgtgcggcagagtggctgaccctgggcctcaatatgccccttttggcataccatatttggaggtatatgagtagaccagtgatgagcggccctggcctctatgacccgacgaccatcatgaatgcagacattctagcctactgtcagaaggaaggatggtgcaaactcgctttttaccttctagcgtttttttactacctatacggcatgatctatgttctggtgagctcttanaacaacacagaanaatcggtccagttaagtgcatgcaaaacgccaccaatgaagggattctatccagcaaggtcctgtttccaagagtagcctatggaatctgatcagttactttaaaaaatgacttcttattttttaaatgtttccacattttttgcttgtggaaagactgttttcatatgttctacttggataaagaatttaaatggaattacgtntaaattaatataaaatgatta

SEQ ID NO: 16 - DNA, 580 bp, Homo sapiens
  misc_feature (1)...(580): n = A,T,C or G
ccatccggtgctgggccggaacctctngttnanagagacccggcctgggagtgggcagcctgtccgcttctctgtgctgctgctgcatggtatccgcttntcctcggagacctggcagaacctgggtactctgcaaaggctggctgaggctggctacagggctgnggncattgatctgccaggncttgggcgatccaaggaagcancagcccctgcccctattggggaaccggcccctgncagcttcctagctgctgtggnggataccttggagctgggacccccagttgtgatcagtccatcattaantggcatgtattcactgcccttcctcgtggcccccgggtcccaactccggggctttgtaccagtggctcctatctgcacagacaaaatcaatgctgtggactacgccagtgtgaagactccagctctcattgtatatggagaccaggaccccatgggctcctccagctttcaacacctgaagcagctgcccaaccacagagtgctggtcatggaaggggcagggcatccctgttacttggacaagcctgatgagtggcataaggggctgctg

SEQ ID NO: 17 - DNA, 636 bp, Homo sapiens
  misc_feature (1)...(636): n = A,T,C or G
gctgtgcgcacgctcaaaccctgcaaaccaatgnccagctacctgggacaggtaaagcgccaacggnagtgacccccaggcgcagctggnaggctatggagatgtacctggcacggagtggactgcaggtggaggacttgaaccggctaaacattattcatgtcactgggaccaaagggaagggctccacctgtgccttcaccgaacggatcctgcggaattacggcctgaagaccggcttctttagctctcctcacatggtgcaggtgcgggagcggattcgaatcaacgggaaaccaatcagccccgagctcttcaccaagcacttctggtgcctctataaccagctggaggagttcaaggacgacagccatgtctccatgccctcttacttccgcttcctcacactcatggccttccatgtcttcctccaagagaaggtggacctggcagtggtggaggtgggcattggcggggcttttgactgcaccaacatcatcagaaagccagtggtgngtggagnctcctctcttggcattgaccacaccagtctactaggagatacagtggagaaaatagcatggcaganagggggcatctttaagcctggtgtccctgccttcactggggtgcagc

SEQ ID NO: 18 - DNA, 570 bp, Homo sapiens
  misc_feature (1)...(570): n = A,T,C or G
gactgagcttggcaattatttatggcgtgttctctgcttcaaatttgatcactccgtccgtggtcgccattgttggacctcagatctctatgtttgtcagtggtttgttttacagcatgtacattgccgtttttatccagcctttcccatggtccttctacacagcatctgtcttcatcggaattgccgctgctgtcctttggacagcacaaggaaattgcctgacgataaattctgatgagcacacaatcgggagaaacagcggaattttctgggcactcttacagtctagcttgttctttgggaatctctacatatattttgcatggnaagggaagacccagatctcangntggnctngttcncgttgctttattaanatggctatgaaagtgagcagcaggactacagaatggcccgtctgctctaancancactcactcccaggaactttggcaccctgatgttgcttctgangcctgccttttcccaagtggctgggctttgctagccaggctcccaagggtctgtgtgcgctcccttgttggatccgngccctccccaggttaa

SEQ ID NO: 19 - DNA, 495 bp, Homo sapiens
  misc_feature (1)...(495): n = A,T,C or G
cccactggtgcaacctagagcgatccatncncntgcncnnttactacctgnaccntatantantncagcgaggaatcctgcnccaacntccactnggtngatacanctggggncacaactattantaatgctgagccgttganaaccatgnnncnnnntngnanacangaggaggactttgtgtcnttacacacctcgagacaaggagagccttcatgagaacctcagggaccctagtccaggggtcaaggctgagaatctggagctggccatccagaaagaggtgagggcctgcgagtggcgaccgaatgagagcacctcctcctagctggcctaggatatctgagctgcgactccagcctgtagcccagttctccagtcatgcccctgaaaccattctgggggtgggagctactcagccttctncagcgtcacactccctagctttagngccctgctggggtgagcggntcttccatcccagctaaccctcta

SEQ ID NO: 20 - DNA, 323 bp, Homo sapiens
  misc_feature (1)...(323): n = A,T,C or G
gactgagatattactctggagagaaaaggccccggttctcaccatcttcattggaggaaaccatgaagcctcaaaccatttgcaagagttaccctatggtggctgggtagcgccgaatatttattatttaggcttggntgnatggtgcannataccnnggagtaagganaggtggcnccatctggcctatttaaatcncangattatagaaaaggtcattntnanngccccccttataatncatctaccataaggannatatgtcatgtgagaantatnnagnnntacattttaaaacagttaaagcaaactaaaaaagaaga

SEQ ID NO: 21 - DNA, 526 bp, Homo sapiens
  misc_feature (1)...(526): n = A,T,C or G
actgagcctgccgctatggctggaacaaggtgccaccagcgctggcctcacaccaaccggacaggaagggccgaggtggctgggtctgggaggagacggagcatcctgcaaagagggtcaagggcggcgaggatgaagagcccccacgcaagctgccaaagcgaaaaattgtgctgctcatggcctactcgggcaagggctaccacaggcatgcagaggaatntgggntcctcncagntcangaccatcgaanatgacttggtatcnngcttatnccangnagnatgnntncctgaaaaccntggcacanatatgaggaagatgtccttccagcggtgtgctcgaacagacaagggtgtgtctgcagcagggcaggtggtatccctaaaggtgtggctgattgatgacattctggacaagatcaacagccaccttccatcccacattctggattctgggattgaagagggtcacaggcgggttcaactccaagaacaagtgtgacgccaggacctactgctacaga

SEQ ID NO: 22 - DNA, 463 bp, Homo sapiens
  misc_feature (1)...(463): n = A,T,C or G
actgagggtccaaggagggctgggcggcacaaacaaccccgagggtccacaagaacgcggccggctgaggtgggtgatccaacggccctttgtcggcctgaaagtcaatccgctcattcttattctggagagaaagaaatccatgagagcagctgggttttacaagtcaagttaacccaccaattgatagacaccggaactctattcgactatgaaaattttgccacggtggccccggcctgggattgtagcactggggaaacagaagggaggacggttcgtccggaagcccttcaattctcagcacctacaatggtgacttacaactatctttaactncagtttcaggccctcgtctgcgctctgcaagctnccgaggaataaaagggatgcncaaatacacgcgcaggtaaaaatacccaaacacattaaaataaaaatttaanttttaaaaaaattaaaa

SEQ ID NO: 23 - DNA, 486 bp, Homo sapiens
tgagggagcccagaggaggcgccctcccgaggccaccactgcccatgcagtccatccattcagccatctggctactgatgtcatgagtaacacgacagtgcccaatgccccccaggccaacagcgactctatggtgggctatgtgctggggcctttcttcctcatcaccctggtcggggtggtggtggccgtggtaatgtatgtgcagaagaaaaagcgggtggaccggcttcgccatcacctgcttcccatgtatagctatgaccctgcagaagaactccaggaagctgagcaggagctgctctctgatgtgggagaccccaaggtggttcatggctggcagagcagctaccagcacaagcggatgcccctgctggacatcaagacatgaccgcccacactccaccactcacccagataggtacaggagcatctgtctattctaaccacctacagctggccccgagccaagccttccaggtctat

SEQ ID NO: 24 - DNA, 484 bp, Homo sapiens
agaattggctgtggctcccacttctgcgagacgctccagggagtggaagaagctaacatccatttgctggtgtgcaactatgagcctccggggaacgtgaagggcccgtaagccctaccaggaggggactccttgctcccagtgccctcttggctacagctgtgagaactctctctgtggtgctgagaaccccgaaaaggccgactgggatttgaagaattctgctcacgtgtggggacctttcctgggactgctgctgccttccctgctgctgttggctggcatggtctgagggggacacccaaaggcctgggagaagaggtcagctgatcaactgctgtgtcctatcctatcgctcaaacaagataccaccgcctgtccaaagcccgtctggaagggaaaggctgtgtggtccagcccatcagtaactgcacaccagggccctcccttgccctttacagtggagttctacagaggaccctta

SEQ ID NO: 25 - DNA, 276 bp, Homo sapiens
gagtactctgtgcaaaaaacttggtgaaaaaggattttttccgtcttcctgatccatttgctaaggtggtagttgatggttctgggcagtgccattctacagatactgtgaagaacacacttgatccaaagtggaatcagcattatgacctgcagtgaagtgaaatctacaagagtcctgctcgctcaaggcctgcatatagggaagaagcaggggaaaagcgttacaaacagctttgttctgcagcattaaaaatgtaacaggtaaaaaaaaaaa

SEQ ID NO: 26 - DNA, 244 bp, Homo sapiens
  misc_feature (1)...(244): n = A,T,C or G
tctgccccgtcaggatgctttccacatcttccgaagctgtgtctctggagacattccttggcctggactcatcttaggggccaccactgtctctctgttctacgggtgtgccgatcaggtttntgtccagcggtttctggcaggaaagagcaggcttcacatggaaggtggctggctattgngcggcctacnttaaagcctgntgnccatgttcctcatggtgatgcccgggcatgatcagccg

SEQ ID NO: 27 - DNA, 215 bp, Homo sapiens
  misc_feature (1)...(215): n = A,T,C or G
actgagactcctgaaggactgtaactacccctgtggctcatcaccatgccttccgacctggccaagaagaaggcagccnaaaagaaggaggctgccaaagcccgacagcgacccagaaagggacatgaagaaaatggagatgctgtcacagaacctcaggtggcagaagagaaaatctgaggaggccaatggcagagagaccacaggagatggag

SEQ ID NO: 28 - DNA, 316 bp, Homo sapiens
  misc_feature (1)...(316): n = A,T,C or G
tgaggttgaccctttgggtttgctgacatgagacttttaaacagcggtacctagtcgctgataaacactggcagagaaatggtggatcaatacttttctacactggtaacgaaggggacattgtctggttttgcaataatacggggttcatgtgggatgtggcctgaggagctgaaagctatgcttggtgttcgcctgagcatcgatacctattggggagtcccttccctttggtcaggactccttcaagattattnnatttattgantatgagancactgaacctgcnttnanacacatcacaagaaggcattgg

SEQ ID NO: 29 - DNA, 431 bp, Homo sapiens
  misc_feature (1)...(431): n = A,T,C or G
actgagatattggcatcaacctgtcagcncctatgttcagaggaatttataggggggtgcanaagcatcangatgacttacnagatgtaatagagagagctatccanattgnncgttaaaaagacntnnntttcagnacannggnntntnacccnacnagatnnnatgagnttgananngnnagcnctgatcattaccttatnannattgctgagcctngctgagaacaacaaaggaaaagttgttgcaataggagaatgtggacttgattttgaccgacttcagttttgtcccaaagatactcaactcaantatttngaaaaacaatntgaacttgtcagaacaaacacanttaccaatgtttcttcattgtcgcaattcacatactgngtttttagatnttatgagaagaaatagagaccggtatgtgg

SEQ ID NO: 30 - DNA, 462 bp, Homo sapiens
  misc_feature (1)...(462): n = A,T,C or G
ccctgcttggtatatgtcaccttcaatcagaagatctacgtgtactgggaggtgcagctggagcgcatggagtccactaaccttctgaagctgctggaggctgagcccgagtaccaccgcctactgcaggagctgcgtgtggatcctgaagatctccctgcagtctgtaccctgcttcatcagactctctaccatccggaccagccactacagtgtaccccctcaagctttcaggaccccacctagctgggctcgaccacttagctggtgaaggatccttccgagcccccaaccctaccccagagcgatccatgaccttggaggatggggagtgtgtattacagaggaaggagcaggactgggttntcagccaggatggatgtggccccccgngagcctgnnatgnaganatccatccggctgcccctctgctcgcggctccttcttatgctccctgctctc

SEQ ID NO: 31 - DNA, 466 bp, Homo sapiens
  misc_feature (1)...(466): n = A,T,C or G
gggaggagttgaagatgagtttgatgctgcccaagagttgctggaatgcatgggctccaacgtggtatacctgtggagcgtgttggaacggggcantctgcaaagatctgcaacaacatgcctgttggctataacgtatgattggaaccagctgaagctatgaaccttggaatcaggtcaggccttgacccaaaactattggctnaaatcctgaatatgagctccggacgatgctggtccancgacacttacaaccccgtacccggggttatgcatggggtcccctcatccaananctaccaangtggatttggaacaacactnanggctaaggatctgggattgnctcaagactctgncactcagcnccaanaacccaattttcctaggaagcctggcccatcanatatacangatgatgtgttcaangggntnctcaaagaangacttctcatctgtgttccag

SEQ ID NO: 32 - DNA, 521 bp, Homo sapiens
actgagcattgagaggtgaatgtccggctgaccctcttccatgtcaggagctgtgtaccggggacgaatcctgtccccaggggcacaaatgctgcagcacagggtgtggccatgcctgccgcggagacatcgagggagggcgggatggtcaatgtcccagaatcctggtaggcctgtgtattgtccagtgcatgatggatgagaactgtcaatccggggaaaggtgctgtaagtcaggctgcggccgcttctgcatcccaggactccagcccctccaacagctcaaagactccaacctgactgatggctttaattctaaactggaggctcaagcgccctagctgacccgatttgcttggcgctccaggaagccaggaaggggtgacatcctggggcttgtgacactccctggagtatcaggcctttgccttgtatctactgctacttgcatgtagcatggaattgccctggtgctgggcgcttctctttcccaataaaatgctggcatggaaaaaaaaaaa

SEQ ID NO: 33 - DNA, 367 bp, Homo sapiens
gactgagggtggccctgactccatgtaggccccagctctgattctgtcattgtggatgacgaggactgactcccacgatatcgcctggaccttgcttggcctttcagtatggggaggattggcatttcctgtctctttcctgcctcttggcattttagcatctctccagtgggctgtcctcgaattctgaacaccaatttacgacaaatcgttgtcattagcatcctggctgcagctgtctcccttttatacttctctgttgtcataatccgcagcaagtatgggtggctgtcaaaggacaagaaatttcaaagaggtaactcacggttagactcacagcaactgaccatcggaggagagaacggtc

SEQ ID NO: 34 - DNA, 492 bp, Homo sapiens
  misc_feature (1)...(492): n = A,T,C or G
gactgagatagacctcttggccccccgcacctagtacaatggagtagacaagacttcgaggggaaagaggcttcccaagatgacccagctcattggcttgactcccaacgccacccacttacacaggccgccccgggactgccaggaactcttccaagaaggggagccggcacagtggacttttccagatccagcctctggggtctccaccatttttggtcaactgtgagatgacttcagatggaggctggacagtgattcagagacgcctgaacnggctctgtggacttcaaccagtcctgggaagcctacaaggatggcttcggagatccccaaggcgagttctggctgggcctggaaaagatgcacagcatcacagggaaccgaggaagccaattggctgtgcagctccaggactgggatggcaatgccaaattgctccaatttcccatccatttgggggggngaggacacagcctacagcctgcagct

SEQ ID NO: 35 - DNA, 368 bp, Homo sapiens
  misc_feature (1)...(368): n = A,T,C or G
ccctgatttgccccgagaaggaagcagcaggcaatgttaccattcactgggtgtactctggctcacaaaacagagaatggactaccacaggaaacacactggttctgagggacgtgcagctcagcgacactggggactatttatgctccctgaatgatcacctggtggggactgtgcccttgctggtggatgntnnaggaaaagggacaccgctcggcctgtgcgtgtggncagccagctgtggaagccatctggcagatttaatagccctggactcccagccaggcacctnagcttagcggctgctaaccccctcagattcttttggcaaaataaagtgaactttattactaagttaaaaaaaaaaa

SEQ ID NO: 36 - DNA, 469 bp, Homo sapiens
  misc_feature (1)...(469): n = A,T,C or G
cctttgttcaggccagnntgttcacaggaagatctgggtatctcagtanccctgagtacccgcagccataccccaagctctccagctgcacctacagcatccgcctggaggacggcttcagtgtcatcctggacttcgtggagtccttcgatgtggagacgcaccctgaagcccagtgcccctatgactccctcaagattcaactagacaaggctggaacacggcccattttgngggaagacgctgccctccaggattgaaaccgacagccacaaggtgaccatcacctttgccactgacgagtcggggaaccacacaggctggaagatacactacacacctnacagcacggccctgccctgatccaacggcgccacctaatggcagcatttcacctgtgcaagccacgtatgtcctgaaggacaatgntttctgtcttctccaagacaggctttgagcttctgcaagg

SEQ ID NO: 37 - DNA, 197 bp, Homo sapiens
actgagggacacagctggtatcacttacattgacaagagactccttgaacttgatgtgaagcctgtaattagaaagagcaatgatggcctcctcagcacggcccacatactctgtgctctctccatgaagttcaaggaaaggaacctgaaaaacagaagaagaaacctttcagagttccagagcagaaaaaataaaa

SEQ ID NO: 38 - DNA, 288 bp, Homo sapiens
  misc_feature (1)...(288): n = A,T,C or G
gccagcagcggacccgnaggcagctcgcccggnaaaagaagctctatgccaacatgtttgagaggctggctgaggaggagcacaaggtgaaggcagaagtggcagcaggagaccatcccactgatgctgagatgaagggtgagcggaacaatgtggccgagaaccagttctcgggtggagacagaagcagnancctgcctcttccgctgcccacctctgcagcntgctccctgctnccttattactccaccctgntagttntgcanaaactgaagaattttgagtgaa

SEQ ID NO: 39 - DNA, 236 bp, Homo sapiens
  misc_feature (1)...(236): n = A,T,C or G
ctgcatataacctaactggcttcaacattttttattcgatcaattcctgtcctaacaactgctctggtcatggaaagtgtacaaccagtgtctntgttgcaagtcaagtgtattgtgaatgcgacaaatnctggaaaggggaagcatgtgacattncttactgtaaagccaattgggggagtccagatnatggctactgtgacctaacaggagagaaactctgagtctgcaacgat

SEQ ID NO: 40 - DNA, 524 bp, Homo sapiens
  misc_feature (1)...(524): n = A,T,C or G
tgagccttttggccataaccagtcccagcaagtatattctacaagagaatactattcttaaggctactgaagtacagttcccgccaaagccagtagtaacacctgaagcaaaggcatttatcaggagatgtctggcctatcgaaaggaagatcgcattgatgtgcagcagctggcctgtgacccctacttgttgcctcacatccgaaagtcagtctccacaagtagccctgcaggagctgctattgcatcaacctctggggcatccaataacagttcttcgaattgagaccaactcctaaggccacaaactgttgagcacacacagtggacatacggcattcagcagtgggtttggaacatagtgaatccgaatggatctcatgaaacctgtaccaggtgcttttattttcttgctttttttccccatccatagagcatgacagcatcgattctcactgagganaagccttgggcagctctggccaggcctcataggaaaaaggtcccgcccaaagttccttgc

SEQ ID NO: 41 - DNA, 409 bp, Homo sapiens
  misc_feature (1)...(409): n = A,T,C or G
tgtgtagtggagctggtcttcaaggtggccacagggagagctaaagaatggctttgctgtggttcgtcccccaggacaccatgccagaggagagcacacccatgggtttctgctactttaactccgtggcagttgcagccaaacttctccagcagaggctgaatgtgagcaagatcctcattgtagacctgggatgtacatcatgggaatgggacccagcaggccttctacaatgaccccaatgttctctacatgtccctgcaccgctatgacgatgggaacttcttcccaggaagtggagcaccanatgaggtgggcacagggccaggcgtgggtttcaatgtcaacatggctttcacgggtggcactcaaaccccccatgggagacgctgagtacttgccatccctt

SEQ ID NO: 42 - DNA, 460 bp, Homo sapiens
  misc_feature (1)...(460): n = A,T,C or G
gagaagcaaagcaaatgcctccttgtgttatattcatcgatgaattagattctgttggtggaaagagaattgaatctccaatgcacccgtattcaaggcagacgatcaatcagcttcttgctgaaatggatggtttcaaacccaatgaaggagtaatcattataggtgccacaaatttcccagaggcattagataatgccttaatacngtcctggtcgttttgatatgcaagttacagttccaaggccagatgtgaagggtcgaactgaaattttgaaatggtatctcaacaagataaagtttgataaatctgttgatccagaaatcatagctcgagggactgttgggttctctggagcagagttggagaatcttgtgaaccaagctgcactaaaggcagcagtctgatggaaaagaaanggntaccatganngaactagagttttccaaggataataat

SEQ ID NO: 43 - DNA, 530 bp, Homo sapiens
tatccagagactaagtccttgatgaaacctgaccacaatctgatctggattgtagccatgatgcttctcgtccagctggcttcattttacttagtcaaagatttggactggaaatgggtcatattttggtcctatgtctttggcagctgccttaaccactccatgactctggctatccatgagcttttcccacaatttcccctttggccaccacaaggccctgtggaaccgctggtttggaatgtttgctaacctctctctcggagtgccatactcgatttcctttaagagataccacatggatcaccaccggtacctcggagcggataagattgatgtagatattcccaccgatttcgagggctggttcttctgcaccactttcaggaaatttgtctgggttatccttcagcctctcttttatgcttttagacccctgttcatcaatcccaaacccattacctatctggaaatcatcaatactgtgatccagatcacctttgacattatcatttattatgtgtttggag

SEQ ID NO: 44 - DNA, 507 bp, Homo sapiens
  misc_feature (1)...(507): n = A,T,C or G
actgaggtgttgtcttacattaatggagtcatgacaaataaacctggaacagccctggtccactntatntcttcacggaatgtgtccctgcgcctgggggcactccaggagggagactctgggacttaccgctgttctgtcaatgtgcagaatgatgaaggcaaaagtataggccacagcatcaaaagcatagagctcaaagtgctggttnctccagctnctncatcctgtagtttacaggnngtaccctatgtcnggaccaatgngaccctgaactgcaagtccccaaggagtaaacctacatgctcagtaccagtgggagaggctggccccatcctcccaggtcttctttggaccagccttagatgctgttcgtggatctttaaagctcactaacctctccattgccatgtctggagtctatgtctgcaaggctcaaaacagagtgggctttgccaagtgcaacgtgaccttggacgtgatgacagggtccaaggctgcagtggg

SEQ ID NO: 45 - DNA, 417 bp, Homo sapiens
  misc_feature (1)...(417): n = A,T,C or G
cagaaaaactatggaatgcggtgtaccactgactgaccgtaaccaaacgaactgtaccgacagtagtttgaaagccagcagttagcagnttcttcagacttcaacactgtccagcgctttccagagcagactcactgtttacaagaactcttggcctcccgaagttagcaacctcagattntgtttatttaaagaatttctgtgaaagaaaaggaccccagagcccattttccaaaatggccatggacgggtatcctgtggatggtcattttgggtttcattattgctttcatcctggcgttttcagtcggngccaacgatgttgccaattccttcggaaccgcngnggnctctggcgtggtgaccctgagacaggcctgcattctggcttccgcattnnaaaccactggctctgtg

SEQ ID NO: 46 - DNA, 334 bp, Homo sapiens
  misc_feature (1)...(334): n = A,T,C or G
tgagtgcggccaaggattctcccagcaggncaatggccattgcatggacaccaatgaatgcatccagttcccatttgtgtgccctcgagacaaacccgtatgtgtcaacacctatggaagctacaggtgccggaccaataaaagatgcaatcggggctatgaacccaatgaagatggcacagcctgtgtggctcaagtggcctttttaggtgggtactcatcggctgcctttagactctctgagcctctctctcaggcctcgtatctttctctaggcctgggactttgccttcagttatatgcactttaaatcccatcaataaaggaaaaaaaa

SEQ ID NO: 47 - DNA, 537 bp, Homo sapiens
actgaggagtcggattgtaacaataagtcacttgataatcaaggggaacagaactccaagcaacacttacctcacttttcaaagaaagacggacttagacggaacaaggttcctgggctctgtaggtctagttctatggactctttttctacaaccaagatcaagcccctggtgcctgccagggtcagtggcctgagcaagaagtcaggaagcatgcagacgagaaaacaccatgatgtggagaacaagccaggcctacagacgaagatcagtgagctctggaaaaactttgggtttaaaaaagattctgaaaagcttccttcttgtaagaagcccctgtctccagtcaaggacaatatccaactcactccagagacagaagatgagatctttaacaagcccgagtgtgtacgcgctcagagagcaatatttcactaagtgcagaccgttgcctacaagaaaatcttatcaactggagagatgtattagtctcaatgtcattttttaaatggattacattttgtatataaaaaaaaa

SEQ ID NO: 48 - DNA, 428 bp, Homo sapiens
  misc_feature (1)...(428): n = A,T,C or G
gagctcgttctatggtncttaccacatncagttcggttttctccangacatncaccagtacctcaatcttgnncttgnngctgaagaganagtcatcgtncacccagaggacatatttagtantcacctgtgagatggncangttcctcccagcaaaccagccctgcaggcagnatggggttggatcagcagttgtcacctcgggggcttnttgaattcccagtgaccaggctgcctcccaccatgggtgaacttggaatctgtgggattctgtagttcagacaaggctgacgactacagtctgcctcagagagacatggcagggacagtgactttctggatcagaggctgagacnaagactggaaagtccttccttagtccagtgacctctatgaatagactggagtcccctctcatcttacagtca

SEQ ID NO: 49 - DNA, 291 bp, Homo sapiens
  misc_feature (1)...(291): n = A,T,C or G
tgcttctacctggaagttggacagnatatcccaggaccgggacttcatcatgaccttcaacacatccctgcatcgctcctgntggatggagaatgntccaggctgcctggtgactcctgntctnaactctcgcctggccctgnaggaccaccacgtcatctnggtcactggctgcctgcttgattatccttacattgaagccctcagtagtgccctgcagatcttcctagctctgnncggcttcgngtttgcctgtnatgtgagcaaagnatncctgcaagaggaggaccg

SEQ ID NO: 50 - DNA, 445 bp, Homo sapiens
  misc_feature (1)...(445): n = A,T,C or G
cagttttgccagtgctcggggttagacctgatctttggtctaaatgcgttactacgaaccccagacttacggtggaacagctccaacgcccagcttctccttgactactgctcttccaagggttataacatctcctgggaactgggcaatgagccnaacagcgtnctngnagaaagcttacattctnatcnnttggnnagcagttaggagaagactttggggagntgcatanacntctacaaaggtcagctttccaaaatgcaanacatntatggncctgacatcngnncagcctcnagggaagacagtntanctgctgangagtttnctgaaggctggcggagaagtgatcgactctnttacatggnataactattacttgaatggccgcatcnntcccaaagaagaaanttctgagctctgangtgctggacacttttattct

SEQ ID NO: 51 - DNA, 197 bp, Homo sapiens
  misc_feature (1)...(197): n = A,T,C or G
gactgaggatgaagatataacacttcagntaacagagagtgaagataatgaggacgatgacatggtcgatgttatctggcggcagttaatatcaagctgcccttggctttctgaacttgatgaaaatgcaactgaaggtgttattaaagtgtggctggaaagttgtggacagaatnttcagcctgtaaaaaaaaaaa

SEQ ID NO: 52 - DNA, 447 bp, Homo sapiens
  misc_feature (1)...(447): n = A,T,C or G
gactgagtaagtatggaatacgagtcgtcagtggccaagtttccagtgactatcaaacaacagactgtacccaagttgtatgaccctggacctgagaggaagatcagaaacctggtgaccattgccnctnaatacttnnatccgncngcactttgcttatcgagagcgtgctgtcangagntttgcntgcatncntacnctncgacntcanntgtntanctgtancnngagngacnggcttaggaatnccnnnggttaaananaagagatgacatactggggaggtacntacacgcatgccctttgggaagggcntggtttgctgggaggaacctggccatctcacaggtgactactaaatatgtcctctgggtggacgatgactttctcttcagcgacaagaccaagattgaggtactggtggatgtcctggagaaaaccgaactg

SEQ ID NO: 53 - DNA, 481 bp, Homo sapiens
  misc_feature (1)...(481): n = A,T,C or G
aggagctcctggccatggtagcagttcctgcgtcgtcagatcgcctcagagaaagaagagatcgaccgcctccgagctgaaattgcggagatccagagccgtcagcagcatggccgcagtgagacggaggagtactcgtccgacagcgagagtgagagcgaggacgaggaggagctgcagctcatcctggaggacctgcagcggcagaacgaggagttagaaataaagaacaatcacttgaaccaagcagtccatgaggagcgggaggccatcatcgagctccgagtgcagctccggctgctccagatgcagcgagccaagtctgagcagcanccgcaggaggaggaggagcccgagaggctgagggggcataggcccaccgccctgtgacggtgtcctcgaggtgcgggtagccaaggagcaggcgaaggcctcgcccagcaaagaccggaaggagacgcccatctgagctgcgggccgg

SEQ ID NO: 54 - DNA, 277 bp, Homo sapiens
gactgagggctcctcaaggtctgttgtgacatggaatgggacaaaatctgggcattcaacaaaaaggttattgacccagtggctccacggtatgttgcattgctgaagaaggaagtcgtcccagtgaatgtcctggatgcgcaggaggagatgaaggaagtagccagacaccccaagaatcctgatgttggtttgaagcctgtgtggtacagtcccaaggttttcatagaaggggccgatgcagagactttctcagagggtgagatggtcacattta

SEQ ID NO: 55 - DNA, 508 bp, Homo sapiens
  misc_feature (1)...(508): n = A,T,C or G
cttaccctgcgttttgcattcacaatggaggctctgaccttgagcggctacctacagccagcacctgcatgaacctgctgaagctcccagagttttatgatgaagccctgctgcgaagcaagctgctgtatgccattgagtgtgctgctggctttgagctgagctgaattgagcccagagaacnttgatctcacccaaaggcagccagcacctaccagacccaagagagcactcaggcaggaccctcagctctcctcaggccttctatctggcatctctccctttctaattttttttttanatgattttatcgngacatagtcacatacatagatggacattgcttttcacataacctanctattgttatgngctatgnggctggtttagnaattttgccaagaagagcacaggttttanaatagnggcaactcagngaaattaaccaaagatgaagctttggccttgctgacccagtttatatcccttnttgggtcaggcaccagat

SEQ ID NO: 56 - DNA, 280 bp, Homo sapiens
  misc_feature (1)...(280): n = A,T,C or G
cagctgctccaggttacngctccgcggnccaggccttgctggggaccttcttcacctggncaatgacagcagccggggcagcncatagngnccatattctccagcgggcagaggctggatcttagacggaagcctgggcttttgnngnaggggtcatgttagcaggcttcctacatggtcgnatgcttgcaccagcggtggagatggcggacatcctcngtgggctttcggagcctttgcctnctncccagccggctgttgncattcaccctgggggccg

SEQ ID NO: 57 - DNA, 303 bp, Homo sapiens
  misc_feature (1)...(303): n = A,T,C or G
gttacatgccgcggtgatgagtgaggagctggctaaagagcctcgtttctgaaagatgatggaagcccacctgtgctgtctgccgactagtacagcggtgacggacggcagctgccatagccagcgagtggaggtgacctgacataccaaagcagaagtggacagtgctgcttntgggcttctcacttgcgacccacngtgcnagatgtgtgcaatttttaactcggcattgaaagaataaaatgtcactacctntcatcttaaaaaaaggataatatanctcttnaacacgcaaaaaaaaac

SEQ ID NO: 58 - DNA, 517 bp, Homo sapiens
gactgagattgattgttcaagtactataatgttggacaacattgcaaggaaagacacaggtgtagatcacgcccagccgaggcctccgtcaaacagaacggtgcagtcaccaaattcatcagtgccatctccaggccttgcagggcctgttactatgactagcgtccatcccccaatacgttcacctagtgcctccagtgttggaagtcgaggaagctctggctcttccagcaaaccagcaggagctgattctactcacaaggtcccagtagtcatgctggagccaattcgaataaaacaggaaaacagtggaccacctgaaaattatgattttcctgttgttatagtaaaacaagaatcagatgaagaatctagacctcaaaatactaactatccaagaagcatacttacctccctcctcttaaacagcagtcagagctctgcttctgaggaaaccgtgttacgatctgatgcccctgatagtacaggagatcagcctggactccatcaagaaacc

SEQ ID NO: 59 - DNA, 479 bp, Homo sapiens
  misc_feature (1)...(479): n = A,T,C or G
gactgagccggcactcagggtatacttcaaggacaacntggtaggataaccttgangtncgggannacagcctannggatgaggtctttgacaccgtcaactcctncattgtgtctggcgagagcatccggtctntnngtcaatgtcaaccttgaagtgcagccctccaaatctgacttagaagctgcaacgggtggctgcgtgctcttacacacctttcgcnagtatctgaaatngaagaactttnnggaanaggnccgtgcacaccgngacctggatggctncctggcccaggccagcatcatcctgaatgagacagctacctcactggatgatgtcctccnaactatgctaaaccgntttgccctggaccctaaccacgcagaacctgactgtgacctgnacctgctcatggctaagctctttacagatgctggagcccctatggagagcanggtccacctgctgtcagataccat

SEQ ID NO: 60 - DNA, 383 bp, Homo sapiens
  misc_feature (1)...(383): n = A,T,C or G
actccaatgcagtttataagccaccagttcccggnctatcacgaccccacaatcgaagatgcttataaaacccaggtgaggattgataatgagcctgcttacttagacatcttggacactgctggtcaggaatcatccanggccctgnacattgcacctgnnntcaaagaatttagcanctncaaatttcttcattagaaatcatntcctgcnattaggtacncaggaggagctanaaaatgatctcattcaaggaaccttgtgntattngctgnaccanttaccantaaatnncatgcggnttttaacaccagngagaaactgnaaacaaatggcccaaaagagttggaaaatatattgtcccacagcaattaaatgtctta

SEQ ID NO: 61 - DNA, 300 bp, Homo sapiens
  misc_feature (1)...(300): n = A,T,C or G
actggtcccctgctgagcaagtaaggagtgcctgagctacggngggcggcctgctcnggagctcctgccagttcgtcccagacctggcgctcatgtccttcatcctttnctttgggacttactccatgaccttgactctgaagaaattcaagttcagccgctattttcccaccaaggtccggancctggctggattgacttctacattgtattctccatcctgcttttctgcngaaacgatgcctgnnttggcctgcagaccccaaagctgcacgtgcctagngtcatctaagcccacaa

SEQ ID NO: 62 - DNA, 291 bp, Homo sapiens
gactgaggctgtccttgttggaaggaccatgaattggcattttcctttcttcatcttgaccacagtgactttatactctgtgcactcccagttcaactctctgtcactggaggaactaggctccaacacagggatccaggtcttcaatcagatcatcaagtcacggcctcatgagaacgttgttgtctccccacatgggatcgcgtccatcttgggcatgctgcagctcggggctgacggcaagacaaagaagcagctctccacggtgatgcgatataatgtaaacggagt

SEQ ID NO: 63 - DNA, 531 bp, Homo sapiens
  misc_feature (1)...(531): n = A,T,C or G
atggtagtactgtgcagatgaactcaagtaatgtcctcaacacagtggtgaacaaacacaaggacctgannacacaatggtggtcacagctggagtcctgcagaagcatgatagctctcatggatacagatggctctggaagactgaatcttcaagagttccatcacctctggaaaaagatcaaggcctggcagaaaatcttcaagcactatgacacagaccattccggtaccatcaatagctatgagatgcgaaatgcagtcaatgatgcaggcttccatctcaacagccaactctatgacatcatcaccatgcgctatgcggacaaacacatgaacatcgactttgacagcttcatctgctgcttcgtcaggctggaagggatgttcagagcttttaacgcgtttgacaaggatggcgatggtatcatcaaactgaatgtacttgagtggctgcagcttaccatgtatgcctgaaccagactgacctcatgttaagagcaactaggatttcatctcaacacaacaatct

SEQ ID NO: 64 - DNA, 231 bp, Homo sapiens
  misc_feature (1)...(231): n = A,T,C or G
acatgcccctggcactgatggcctgtgccctccgaaaaagggccacagngttccggcagnctctggtggagcagctctgaggaatatgccctgcangtgaacngggaggcacgaatacctcnacggcnnctacccgntctgccactttcannacatctgcagntgcctacacanngggcatgacncctnatcgtgaccatgntccactnctcctccatccttgctatgcgg

SEQ ID NO: 65 - DNA, 462 bp, Homo sapiens
  misc_feature (1)...(462): n = A,T,C or G
tggtgggatcctcccgtgggacagtggannaccaccatgagcgactactacgtttgggnagancnanngctnntctctgacangttatnatgntcgctgatgntatagtacctcacagnncatnnattgntgtggantgccacnccccctgaanagcgtttgagattaaaaccgcgtatttnccntctanngnaaancgnangcacanaacanngacatcatcgggcctngngncacctgatggcctgncctgtgactgggttggcaagaagctgtactggacggactccganaccaaccgcattgaggttgccaacctcaatgggacgtcccgtanggttctcttctggcaggacctggaccagccaagggccattgncctggatcctgcacatgggnacatgtacnggactgactggggngaagcaccccggatcgagcgggcatgggatggatggcagt

SEQ ID NO: 66 - DNA, 374 bp, Homo sapiens
tgaggtacttactttagcctctggtactacaacaagcagaatcagcggcgctgggtggatttggagaaacccctgaagaagcagctggacaagcacgcactggagcctaccgtctacttcggcgtgctattctatgtgccttctgtttcccagctgcagcaggagattaccaggtatcagtattacctgcagctgaagaaagatattctggaaggaaaccttccctgtacattagaacacgccattcagctggccggcttagctgttcaagctgattttggtgactttgatcagtatgaatcccaagattttcttcagaaatttgccttgctccccgtggcatggctacaggatgaaaaagtgaaaaaaaaaaa

SEQ ID NO: 67 - DNA, 396 bp, Homo sapiens
  misc_feature (1)...(396): n = A,T,C or G
attctacaaagaaattaaaggtatgttcttgaagaatnccatggtaatggcagtgcttgcaaagnataatcctgaagggaccatagattttgaaggcttcaagctattcatgaanacctttctggaagctgagctgcctgacgatttcaccgcccacctttttatgtcattcagcaacaaatttccccattntagcccaaatgtaaagagtaagcccgctnttctttcaggnggnctcaggatgaataagggtgccatcacccctccacgttcctctccagcaaatacatgctccccagaagtgatccacctnanggatatcgnctgctacctgtctcttntcgaaagaggaagacccgaggataagctcgngtttangtttcgcctttatgacac

SEQ ID NO: 68 - DNA, 491 bp, Homo sapiens
  misc_feature (1)...(491): n = A,T,C or G
ccataatgggcgaaccccatggatccatgnggatcctagtgacagggggctctggactggngggtagagccatccananggtggttgcanntgnggccggcttacctggagaggaatgggtgtttgtctcctccaaagatgcatatctgacggatgcngcccaaacccaagcacgtcttccagaaagtncancccacccacntcatccatctcnctgcaatggnaggcggccttttccggaatatcaaatncaacttgnatttctggcggaaaaacgtgcacatcaatgacaacgtcctgcnttcggccttcgaggtgggcgctcgcaaggnggtctcctgcctgtccacctgcatcttccctgacaagaccacctatcctattgacganacaatgatccacaacggnccgcctcacagcagcaatttcggntactcatacgccaagaggatgattgacgtgcaaaacagagcctacttccagcagcacgg

SEQ ID NO: 69 - DNA, 382 bp, Homo sapiens
  misc_feature (1)...(382): n = A,T,C or G
tggactcccgggccctgaagaagacttgctgaggacatgaacctnttcaaaaccaaccacctgttcttctttctcctcctgccccacatcatngtnntggaaagccttgcctggttcatcctctcgtacttnggcactggctggattcctaccctcgtcacagcctttgtcctcgctacctctcaggcccaagctggatggctgcaacatgactatggccacctttctgtctataagaaatccatatggaaccacgttgtccacaagtttgtcattggccacttaaagggtgcctcagccaactggnggaaccaccgacatttccaacaccatgccaagcccaacatcttccacaaggacccggacataaagagcctgcatg

SEQ ID NO: 70 - DNA, 519 bp, Homo sapiens
  misc_feature (1)...(519): n = A,T,C or G
gactgagggatgttttatctctaagaataccaagagctcaggcagggcttctgtgccctgcttcctccctggcttgagctggatcctggaccagctgctgacctcctattcactctggcactgccctcacgtctccgtcatgacccatctgctcacagtgttcctggtggccctgatgggcctgcctgtggcccaggctctggagtgccacgtgtgtgcctacaatggagacaactgcttcaaacccatgcgctgcccagccatggccacctactgtatgaccacacgaacttacttcaccccataccggatgaaggtgaggaagtcctgtgtccccagctgctttgaaaccgtgtacgatggctactccaagcacgcatctgccacctcctgttgccagtactacctctgcaacggggctggctttgctaccccggtgaccttggccctggncccagcactcctagctaccttctggagcttgctggaaactcggttccccaagccagatccaccgtt

SEQ ID NO: 71 - DNA, 286 bp, Homo sapiens
  misc_feature (1)...(286): n = A,T,C or G
gactgagctctatttgaaggagtccaagggcagtcggcggtggttactctttctggaaggcggctggtattgcttcaaccgggagaactgtgattccagatacagcaccatgcggcgcctcatgagctncaaagactggccacacacactgcacaggtactggtattctatcctcccagccnnagnagaacccccagtgnttggantgncaatatggtnttccnntgttactgttacngnnaacctggganagcagcttccantnatgctgaatggaaggattatg

SEQ ID NO: 72 - DNA, 430 bp, Homo sapiens
  misc_feature (1)...(430): n = A,T,C or G
gactgagacagccacgggaatgtggaggccnaagtggtgtgtttctacagaaggcnggacatttncagcagcctcatcgcgctggcggacaagcntgcnagggaggtggaggaggaggtanaaaacccagagatggtggacctgcctgagaancttaagcatcanctgctggcatcgagaactgntcctgtctcggcagttggagtntctgcctgccacccacatcaggggcatgtgcagtgttaccctgctcaatgagacggagtcactcnagtnctacttggagcgtgaggatttcttcttctactctcttgnataccatcaataatgttaggtgcgccctnaanaagctgangnnnaatgaatcttgggtnnttagncctgngcaaanggnaaggaaggcgctngctcaaaaaaaaggctggggtca

SEQ ID NO: 73 - DNA, 478 bp, Homo sapiens
  misc_feature (1)...(478): n = A,T,C or G
tgagcacagcctatgcccctgaggctaccgactatgacctccgagtgctattgcgcttcccccagcgagtgaaaaaccaaggcacagcggactttctccccaaccggccacgccacacctgggagtggcatagctgtcaccaacattaccacagcatggacgagttcagccactacgacctgcttgatgcatccacgggcaagaaggtagccgagggacacaaggccagcttctgcctggaggacagcacctgtgacttcggcaacctcaagcgctatgcctgcacctctcacacgcagggcctgagtccaggctgctatgacacatacaatgcggacattgactgccagtggatcgacataactgatgtgcagcctgggaactacatcctcaaggngcacgtgaaccccaagtacattgttctgggagtctgacttcaccaacaacgngggngagatgcaacatccactacacaggt

SEQ ID NO: 74 - DNA, 340 bp, Homo sapiens
  misc_feature (1)...(340): n = A,T,C or G
ccagcaagcatggtgaattctgtggaagggtgtgctgatgatgcccttgctgggttagtancctctaaccctgacttgcagctcctgcaagggcaccgtgtggccctacgttctgacctggacaccctcaagggccgggtagcacttctgtcaggtggaggctcaggccatgagcctgcccatgccggttttatcgggaaagggatgctaacaggtntnntcgcaggatgtgtgtttgcctctcctcctgtggncagcatcctngcagccattagagctgnggcccaggcaggcacagngggcaccctcctcattgagaagaactacactggggatcgag

SEQ ID NO: 75 - DNA, 184 bp, Homo sapiens
  misc_feature (1)...(184): n = A,T,C or G
taggaagaaacggagctggaaccttacctggaagnataanctgacaaaccagcggcccctcgaggagnttctgncagacaggactgggnnnnntcctgctggcgaccgccattgncaacatnaagttnntnctaggacactcggagagcaatcagcgaggccantgaagacccagaaccagagc

SEQ ID NO: 76 - DNA, 535 bp, Homo sapiens
  misc_feature (1)...(535): n = A,T,C or G
gactgagcctcctagtaattgggaaatggtggtgtgagatggagccctgcctagaaggagaagaatgtaagacactccctgacaattctggatggatgtgtgctacaggcaacaagattaagactacacgaattcacccaagaacctaacagaagcatttgttatataaataggaaaaagaacaacctgtggaatatactgttgtgaggatttaaaacatcttccatagttgcaagccaagtggatctcttatctgcactttggttaccagataaccacagtgcacttactctgatacacagtatcccaaaagaagaagactcgggattttntggcaacatcaaggaaaatggnttttaaaaaaaaatgagttttntttgtgaaatttggaggatcatgaagaacgatcaactgtcttntaatttggaactaacattactttgtaccatttgaaatatatatgtatatataatattttgaaatattatatattctcttcaagaaatgaacagtacccccaatgtgaaaaaaaaaa

SEQ ID NO: 77 - DNA, 297 bp, Homo sapiens
gactgagattaagaagctctgtgaccgcgtagcttcctctacgttactggatgaccgaagaaatgctgtacgtgcccttaaatcactctctaagaaataccgcttagaagtgggaatccaagctatggaacatcttatccatgttttacaaacagatcggtcctgagttcaaatcccagcaaccacatggtggcctcataaccatccgtaacgaaatctgatgccctcttctggaatgtctgaagacagctacagtgtaattatatatagtaaataaataaatatttttaaaaaatg

SEQ ID NO: 78 - DNA, 656 bp, Homo sapiens; identical to SEQ ID NO: 9
  misc_feature (1)...(656): n = A,T,C or G

SEQ ID NO: 79 - DNA, 651 bp, Homo sapiens
  misc_feature (1)...(651): n = A,T,C or G
cacaggtggggctggctacatcggcagccacacggtattggagctgctgggagcaggctactcgcctgtggtcattgacaacttccataacgccattcgtggagaagactccatgcctgaggagcctgcgccgggtccaggaattgacaggccgctctgtggagtttgaggagatggacatcttggaccaggcagccctacagcacctctttaagaagcacagctttaaggccgtcatccactttgctggcctcaaggctgtgggcgagtcagtgcagaagcctctggactactatagagttaacttaacagggaccatccagcttctagagatcatgagggcccacggagtgaagagcctggtgttcagcagctcagccaccgtgtacgggaacccccagtacctgcctctggatgaggcccaccccacggggggctgtaccaacccctacggcaagtccaagttcttcatcgaggagatgatccgggacctgtgccgggcagacacggcctggaacgccgtgctgcttcggtacttcaatcccataggcgcccacgcctctgggcgcatcggtgaaaatnctcanggtattnccaacaacctcatgccctacgtctcccaggtggcaatcgggcgacaagaggttcatt

SEQ ID NO: 80 - DNA, 647 bp, Homo sapiens
aatggaaactgaaaacccaaaaactatggaagaaagcactgagaagagaaaagaagaaaagaagaagcgctcccgggttaaacaggtgcttgcagatattgctaagcaggtggacttctggtttggagatgcaaaccttcacaaggacaagtttctgcgagagcaaattgaaaagtctagagatggatatgtggacatttctctcctggtgtcttttaacaaaatgaagaagctgacaactgatgggaagctaatagccagagcattgaaaagctcatctgttgtagagttggacttagaagggaccagaatcaggaggaaaaaacccctaggtgagagaccaaaggacgaggaggaacgcacggtatatgtggagttgctccccaaaaatgttactcatagctggattgagagagtatttgggaaatgtggcaatgtggtttacataagtattccacattacaagtctactggggatcctaagggatttgcctttgtggaatttgaaacaaaagagcaagcagcaaaagccattgagtttctgaacaacccaccagaagaagcacctagaaagcctggtatatttcccaagacagtgaaaaacaagcccatcccttccttacaagcagaagagaagaaaaagaaaa

SEQ ID NO: 81 - DNA, 647 bp, Homo sapiens
  misc_feature (1)...(647): n = A,T,C or G
agtggggtctttcaacggcggacggnggttacccgcggagtatgggatatccagtatggcacgagggaggaggtgtggtggngtaccnagnacgactactgctcgggctcggtcatgtcggagcgtgtgtcgggcctggcgggctccatctaccgcgagttcgagcgcctcattcactgctatgacgaggaggtggtcaaggagctcatgccgctggtggtgaacgtgctggagaaccnngactcggtgctgagcgagaaccaggagcacgaggtggagctggagctcctacgcgaggacaacgagcagctgctcacgcaatacgagcgcgagaaggcgctgcgcaaacaggccgaggagnngngtgtgccccggncgccgcctngagngacggngtgnntagangtgcagnacccagntcngctcantcggnagtatnctgntgatgctgatgccgangctgctggntatgtgccactttntccatccaatngagacctaaancacagcctgtgcaaagnccggnagacntgngcccccattcctgctggnctctgaccttggctgncgccngctnnntctnggattntattccttcccgtcttnggagcagggtgcnctagaatcacaaagcgccagaattctac

SEQ ID NO: 82 - DNA, 645 bp, Homo sapiens
  misc_feature (1)...(645): n = A,T,C or G
agtttgtgggcattgccccanctaanatatccacaccggnaccccganntagaagactcagctgccaggcagaacactgaagggaagcggctccaagtcgcttcagcctttaccctccggttccaggacaggagagctctctgcagtgggcagggatgaagtttgaggacgtcccaattgcacacattaaagcaacctacaacaacacacagatccaggtagtctctgccaccaatgcgtccctggcccgcgcctcctgtggcacagaaggctttcgcaatgccaagaagggcaccggcatcgccgcacagacagcaggcatagctgccgcagcaaaagccacaggaaagggagtgacccacatcagagtcgtagtgaaaggcatggggccaggacgctggtctgccatcaaaggactgaccatggggggtctggaagtgatctcaatcacagacaacaccccggtcccacacaatggctgccgaccccggaaggctcgaaggctgtgacgggaagggagcctgcacttggacctggcctcaggtcttgactcctgtggatcctacagaaggcccactgtggaagccgctggagccggctgttctcgagccctncttggggaaacactccttttctcgcaccgag

SEQ ID NO: 83 - DNA, 636 bp, Homo sapiens
  misc_feature (1)...(636): n = A,T,C or G
acctgagtgcaaaacattnnaagaacactttgagaagcacatattccaggaaacagaaagctggtccaaagccccggcccaaggatgtgtttgacttttctaataattctgatgcctcaagcataccgggagcactcgaggaagaagaggagacttacgaaaccttcgacccccctctgcacagtacggctatctacgcagaagacgagctgtccaaacactgtgtgtcctccagttccctggccacccacagagggaaggcgagcagaaacttggacccttctgaagatgaagcaagtggaaatgagtctatcaaggtcagcacaaaaaagccaaggagaaagctggagcccatcagcggcgagtcggacagctctgcagatgatgtaaggaggagggtggcatctgcagaaggaccaaggtcacagcaacgccaggctgctcctgcagcaccgtcaccccctgagaggccagccgagccggtcactcccaggaggacaagactccacagcgctcagctctctcctgtagacgagacaccagcaacccaaagtcagctggtgagcagtgctcgcctccgccctcgctcgggagagaagagttcantaaaaagattagggaggaataaagaggtct

SEQ ID NO: 84 - DNA, 636 bp, Homo sapiens
  misc_feature (1)...(636): n = A,T,C or G
atccagtagcaggcgggacgccgcnggcgagtgcggnggaggagcagctncgggcaggcngagggaggaggaagaggcgnangncgtggagtacctggccnanctgccggtagccgntgctgctgcncgtgctggccnagntgccagctacggagctgntgcaggcctgccncctggtgtgcctgcnctngtaaggagctggtggacngcgccccactgtggctgntcaagtgccagcaggaggggctggtgcccgaggncagcgctgatgaggagcgggaccactggcaacagttctactttctgagcaagangaggcgcaacctgctgcgcaacccttgtggggaagaggacttggagggctggagcgacgtggagcacggtggggacggctggaaggtggaggaactgcccggagacaatggggnggaatttacccaanatgacagcgttaagaaatacttcgcctcctccttcgagtggtgtcgcaaagcgcaggtcattgatctgcaggcagagggctactgggaggagctactggacaccacccagcccgccatcgtggtgaaggactggtactcgggtcgcacggntgcggncagcctgtatgagctcactgngaggctgctgtcgtga

SEQ ID NO: 85 - DNA, 635 bp, Homo sapiens
  misc_feature (1)...(635): n = A,T,C or G
acctgaggcaatgtggctggtagctaggtgcctgctgcgcaggacctgtggaccgctgggcagggctgtatcgtctgccctgtgggggggccctaggacctaggccccactggtgggggccatgtaggagttgcttggcccaaagtgttcatcaagaccagcctggaagaggcctcagtgaagatgacattcgcagggcacgggaggcccggctcaggaaggcaccccggccccagctgagtgatcgctctcgtgaacgcaaggtgcctgcctcccgcatcagtcgcttggccagctttggggggctggctgtgggcttgggcctgggagcgctggctgaggtgactaagaagtccttgccaggtggaagtctgcagcatgagggcgtctctggattgggctccagtcctttcctctccgaggccaatgctgagaggatcgngcagaccttatgtacagtccggggggctgccctcaagatcggccaaatgctcagtatccaggacaacagctttatcagcccccagcttcagcgaatctttganagggtccgacagagtgccgactttatgccccgctggcaaatgatgagagttctagaaaagggagctnggcaaggactggcaaagacaagg

SEQ ID NO: 86 - DNA, 634 bp, Homo sapiens; identical to SEQ ID NO: 10
  misc_feature (1)...(634): n = A,T,C or G

SEQ ID NO: 87 - DNA, 634 bp, Homo sapiens
  misc_feature (1)...(634): n = A,T,C or G
acctgagcgtcccgggctcccgngtgtctcccatggcggatacgaccccgaacggcccccaaggggcgggcgctgtgcaattcatgatgaccaataaattggacacagcaatgtggctttctcgcctgttcacagtttattgctccgctctgttcgttctgcctcttcttgggttgcatgaagcagcgagcttttaccagcgtgctttgctggccaatgctctgaccagcgctctgaggctgcatcagagattacctcacttccagttgagcagagtgttcctggctcaggccttgttagaggacagctgccactacctgctgtattcactcatcttcgtcaactcctaccctgtcacaatgagtatttttccagtcttgctattttctttgctccatgctgccacatacactaagaaggtcctggacgcaaagggttcaaatagtttacctctgttgagatcattcttggataaattaagtactaaccaacaaaatattctgaaattcatcgcttgtaatgaaanattcttgatgcctgctacaggtnttatgctctttagnggccaaggaagnttgctncanccttttttatattatnganttcttactcttcnatattcctctagaaaaaa

SEQ ID NO: 88 - DNA, 633 bp, Homo sapiens
  misc_feature (1)...(633): n = A,T,C or G
tttactagtttggtgtttaaagtatgtcatacatggcaaaatttcgaacaggacctgcatccttttgtcactttttattctatttattttttctgctgatgatgggcttaaagatgctgtggccaaacgcagcatcctttggacctccttttggacttgacctccttccagaacttcatccactaaatgcgcattcgggaaacaaagctgacttccaaaggagtgatagaatcaacatggaaacaaacaccaaggctttaaaaggcgctggcatgactgtgctgccagccaaagcctctgaggtgaacctggaagaactacctcctctgaattactttttacatgcattttattacagttggtatggaaatccacagtttgatggtaaatatatacactggaatcatccggtcctggaacactgggaccctcggatagccaagaactatccacaaggacaacatagtcctccagacgacattggctccagtttttatcctgagttaggaagttacagctctcgagacccttctgtcatagaaactcacatgaaacaaatgcgctcagcctcaattggttgggaattattttattttatttatttatgngtatataaataattctggtggacaa

SEQ ID NO: 89 - DNA, 633 bp, Homo sapiens
  misc_feature (1)...(633): n = A,T,C or G
cagggaacgggtgtanggtgttggaaccggtgcagggtatgnggcaggnagggaagtaactgtgccatcagtcccagaactttcctgctgcctgaggccatgacctttgaagaagctgctgccttgctggtcaattatatcaccgcctacatggttctctttgacttcggcaacctgagaccgggccacagcgtcttggtacacatggctgcaggtggcgtgggcatggcagccctgcagttgtgccgcaccgtggagaacgtgacagtgtttggaacggcctcagccagcaagcacgaggtgctgaaggagaacggggtcacacaccccatcgactaccacacgactgactatgtggacgagatnanaaagatctcccccaaaggagtagacatcgtnntggaccctctgggtggatnanacacnggcaagggctaccacctcctcanacccatgggcaaagntgtcacttacggaatggctaacctgctgacgggccccangcggaacctgatggccatggcccgnacctggtggaatcanntcantgtgacanctntgaagctgctgcaggccaaccgagctgtgtgtggttnncacctgtnntacctggatggagaggtggaactcgtc

SEQ ID NO: 90 - DNA, 632 bp, Homo sapiens
  misc_feature (1)...(632): n = A,T,C or G
actgagttgcatgaggacagtggtncccctggcgggaggagcggcctgtccctgctctccaggtaggagctgtgtatctgcatgaagaggaggttgctcaggaccatcgggaccaggcaagagcggcggaacccatggaggcctctctgggtccgcgcggagatcccatggtggtgctgtcagtggtccctggggcagctgaggaccaacggagccccgaggcccacgatggcacctgcagtgcgcagggagaggaggacccgagctgtggccgagagaacctcttcngnctgcagggggcaggcggcttccaggatcgggaagaggagtactatgctgagcctggcgtgactgaggccgagcctgtagccnccgaggatgccaacagcactgacagcctcaagtcccccaaggtgaattgtgaggagaggaatgngactgggctanaaaacttnactctgaagattttaaatatgtcccangacctcatggatttcctaaacccaantggnagnnactgtacactgntnctnttctacnccccngtggtgccggttttatgnnaagccnggctccttntttganctccctgccccgggncgtttccaacacttggattcttggctctggga

SEQ ID NO: 91 - DNA, 632 bp, Homo sapiens
  misc_feature (1)...(632): n = A,T,C or G
actgaggtggggtctttaccgcctcaccctctcntgtctgtggccgtggagttccgcgactacctgggcgacttcatcgagcactacgcgcagctgggccccagccagccacccgacctggcccaggcacaggacgagccacgccgggcgctcaagagcgagttcctggtgcgcgaaaaccgcaagtactacatggatctcaaggagaaccagcgcggccgcttcctgcgcatccgccagacagtcaaccgggggcccggcctgggctccacgcagggccagaccattgcgctgcccgcacagggtctcatcgagttccgtgacgctctggccaagctcatcgacgactatggagtggaggaggagccggccgagctgcccgagggcacctccttgactgtggacaacaagcgcttcttcttcgatgtgggttccaacaagtacggcgtgtttatgcgagtgagtgaggtgaagcccacctaccgcaactccatcaccgtgccctacaaggtgtgggccaagttcggacacaccttctgcaagtactccgaggagatgaagaagattcaagagaaacagagggagaagcgggccgcttgtgagcagcttcaccagcagcaacagcagcagca

SEQ ID NO: 92 - DNA, 632 bp, Homo sapiens
cctggcgtctggcagtatggcacctgtgaggaagagcggagtctccgggaatgcgagctctatgtgcagaagcacaatatccaggccctgctgaaggactccatcgtgcagctgtgcactacgcggcccgagaggcccatggcattccttcgggaatactttgagaggttggagaaggaggaggcaagacagattcagtgtctacagaaaaccggcatccgtactgactcgagggaggacgagatctctcctccaccccccaatccagtggtgaagggccgacggcgccgaggtgctatcagtgctgaagtttacactgaggaggatgctgcctcctacgttagaaaggttattccaaaagattataagacaatggctgctttagccaaggccatcgaaaagaatgtgctgttttcacaccttgatgataacgagagaagtgacatttttgatgctatgtttccagtctcctttattgctggagagacggttattcagcaaggtgatgaaaggggataacttctatgtgattgatcaaggagaaatggatgtctatgtcaataatgaatgggcaaccagtgttggggaaggagggagctttggagagctggcttttgatttatggaacaccg

SEQ ID NO: 93 - DNA, 629 bp, Homo sapiens
  misc_feature (1)...(629): n = A,T,C or G
gtcctgaccgacaactttgctgaaactgaanagcggtgtcaagcccagccgcccgctgttggccccgggggctctcctggcatccagaattcggatcatgactcctgtgagcagccacggcttggcggagagcatttttgacctggactacgcttcgtggaagattcggtcgactctagcggttgctggctttgtcttctacctgggcgtctttgtagtctgccatcagctctcatcgtccctgaatgccacctaccgctccctggcggccaaagagaaggtcttctggaacctgncggcagacgcgtgctgtcttcggcgtccanagcacaactgcaggcctgtgggccctgctgggagaccccgtgctctatgccgacaaagctctcgggcagcanaactggtgttggtttcacatcaccacggccactggcttcttcttctttgagaatgnggncgttcacctgtccaacctgttcttccgcacctttgacttgnttctggntgtccaccacctctttgcctttcttgggttcctgggttcagcgatcaatctcaaagctggccactatntagccatgaccacgttgctcctaaagatgagcacgccctttaacctgcatttccta

SEQ ID NO: 94 - DNA, 628 bp, Homo sapiens
  misc_feature (1)...(628): n = A,T,C or G
tgaggtgttacctgtttggcctatgatgaagccttatggctagcaggtaccgaattcagcnagagattgctgtgcagaatcctctggtgtcagagcggctggaactctcagtcctgtacaaggagtatgctgaggatgacaacatctaccaacagaagatcaaggacctccacaaaaagtactcatacatacggaagacccggcctgatggcaactgcttctaccgagcgtttggcttctcccacctggaggcactgctagatgacagcaaggaactgcagcggttcaaagccgtgtctgccaagagtaaagaggacctggtatcccagggcttcactgaattcacaattgaagacttccacaacacgttcatggaccttatcgagcaggtggagaagcagacctcagtagctgacctgctggcctccttcaatgaccagagcacctcagactaccttgtggtctacctgcgactgctcacctcaggctacctacagcgggagagcaagttcttcgagcacttcatcgagggtggccggactgttaaggagttctgccagcaggaggtggaacccatgtgcaaggagagcgaccacatccacatcatagccctggcccaggccctcag

SEQ ID NO: 95 - DNA, 628 bp, Homo sapiens
  misc_feature (1)...(628): n = A,T,C or G
tgtctgtgtcctgctctccttcccgttatcttngcccgtgcctgggctgcggggaagcccgcctgaatgggctgccttgctgtactatggacccttcattgtcgtcttccagtttggctgggctgccacgcagattgcccacctgagcctcatcccagagctggtgaccagtgaccacgagaaggnggagctcacggccctcaggtatgcgttcactgtggnggctaacatcaccgtgtacggcgcancctggctgctgctgcacttgcagggctctgcacacggcgagcaggacatcagtgtgggtgaccagctaggagtccaggatgtgcccgtgttccggaacctggccctgcttgtggngggtgtgggagccatcttctctctgctcttccacttgggtaccaaggagggccacaggtcccancactggggggaacgaacccnatgagcacacccccctggtggccccagccggntccagccactgntgctgttggaaacactggctttngggagccngcntttttntaaggtagggcatgctgtacatgaccacaaggcttcatttgngaaaccngtctcagacnctacatttgcnangcgcctcgacctatttttttttagc

SEQ ID NO: 96 - DNA, 627 bp, Homo sapiens
  misc_feature (1)...(627): n = A,T,C or G
cttggtggcccgtctcttgtttttcctggtttatgactttcggctttgtggaatacggctgagatgaaaggatttattgacgatgcgaactactccgttggcctgttggatganggaaccaacctnncaaatgtnatgncnaactatgccttngaccgtgccctgacaggaaaaaaatgcattttttgtgggggatcttgggaagatcgtgaagaagcacagtcagtggcagaccgtggtggctcagataaagccgttttacacggtgaagtgcaactccactccagccgtgcttgagatcttggcagctcttggaactgggtttgcttgttccagcaaaaatgaaatggctttagtgcaagaattgggtgtatctccagaaaacatcattttcacaagtccttgtaagcaagtgtctcagataaagtatgcagcaaaagttggagtaaatattatgacatgtgacaatgagattgaattaaagaaaattgcanaggaatcacccaaatgccaaggtcttactacatattgcaaacagaagataatattgnaggtgaagaagggaacatgaaagtttggcnctacnctgaagaantgnagggcatctttactgcacctcctgggaaa

SEQ ID NO: 97 - DNA, 621 bp, Homo sapiens
  misc_feature (1)...(621): n = A,T,C or G
tgagacccctgctattgctgatatctacncagaacntgcccatcnagtggtagtagcctagtatgcacccagcggattctacattgcttctggagacatctctgggaagctaaggatctgggataccacacagaaggagcatcttctaaagtatgagtaccagcctttcgctgggaagatcaaggacattgcctggacggaagacagtaagaggatcgccgtggtcggggaaggaagggagaagtttggagctgtcttcttatgggacactggctcttctgtgggtgagatcacaggacacaacaaagtcatcaacagtgtggacataaagcagaccaggccctaccgactagcaacagggagtgatgataactgtgctgcgttcttcgagggccctccattcaagttcaagttcacaattggtgaccacagccgctttgtcaactgtgtgcgattctctcctgatgggaacagatttgccacagctagcgctgatggccagattttcatttatgatgggaagacgggagagaaggtgtgtgcccttggagaaagcaaggcccatgatggaggaatttatgccattagttggagtcctgatagcactcatttgctatctgc

SEQ ID NO: 98 - DNA, 621 bp, Homo sapiens
  misc_feature (1)...(621): n = A,T,C or G
acctgaggagtgaagatagtccagnncctaagagacagcgcctctctcattcagtctttgattatacatcagcatcaccagctccctcaccaccaatgcgaccatgggagatgacatcaaataggcagcccccttcagttcgaccaaatcaacatcacttctcaggggaacgctgtaacacacctgcacgcaacagaagaagtcctcctgttaggcgtcagcgaggaagaagggaacgtctgtctcgacataattccattagtcaagatgaaaactatcaccatctcccttatgcacagcagcaagcaatagaggaacctcgagccttccaccctccgaatgtatctccccgtctgttacatccagctgcccatcccccccagcagaatgcagtcatggttgacatacatgatcaggtacanntacnnantgncctggaactncntgnggtaaaagntaacggtgnctaangnggatctatcganntgnggggcttgttgcnngntcctnnaattcctgaagtgcancnagnttgngtggnnccntnctttnannaanggaaatttagccagggtntgtggcacataacttgaacattgtntcaatgaatgaatgagagaa

SEQ ID NO: 99 - DNA, 621 bp, Homo sapiens; identical to SEQ ID NO: 11
  misc_feature (1)...(621): n = A,T,C or G

SEQ ID NO: 100 - DNA, 618 bp, Homo sapiens
  misc_feature (1)...(618): n = A,T,C or G
acatacacctgtgggatacacgaacttcaagactgngatgctantgtttttattgccctttatcaatccattttgggagaaaaggtaccagacctcatagttcttcccaggaatcaagaagacgaggcccacaatgtccaagcggtaattgattcactcgctttggattaccttcaggtcagcctgtctcacataacaggagaaaacatagtgaaaggggataatgaatctatcaggaatctcctagaaatatttgatggattgctggattatctgacagaacacatcagtgaatcgtctcccaacaaaagtgaaactgagcagtattctaaagattctcatggagaagaagctggggaggacctagaacgtaccgaggaggcgaagtggagaaacgcttcttttatgaggtgttccttctcatcggacactttgggccccacctgggatgaagacgaagctgagtccacaggtgaaataattaggctgggagacactgcacataccttttcccaaagaagtaatggtgctcaaaattctaaggacttacgggctanaaaagcctcggcttcaccaggcgttgagccacctgaggaaatgttgaaccctggcccattg

SEQ ID NO: 101 - DNA, 618 bp, Homo sapiens
  misc_feature (1)...(618): n = A,T,C or G
gcttgctgtaacttggcttccttacctgcacccccaagaatgatgagatnctatcagcnggggnggntgnaataccctaaactggttttccgagcaggncggcancatacccncangagctgcttaangcaggtccccgaggcctttctcacactgcataancatggntgcttgtttngggacgnggngaggatccaaggcaaagatgngctcaccccagtatctcncatcctcatcggggacccaggctgcncctacaagtacttgaacaccagactcttcacggtgccctggcccgtgaagggctgcactgtcaagtacacagaggctgagatcgccgctgcatgtcagaccttcctaaagctcaatgactacctccaggtggagaccatccaggccttggaagaactggctgtcagagagaaggccaatgaagatgctgtgccactgtgcatggcagagttccccagggccggcgtggggccgtcctgtgatgatgaagtggaccttaagagcagagcagcctacaacgtgactttgctaaacttcatggatcctcagaagatgccctacttgaaagaggagccntatttcggcatggggaagatggcggtgagc

SEQ ID NO: 102 - DNA, 616 bp, Homo sapiens; identical to SEQ ID NO: 12
  misc_feature (1)...(616): n = A,T,C or G

SEQ ID NO: 103 - DNA, 615 bp, Homo sapiens
agtgtggctgccaacgtccgggtgggaaatgcactgggcgcaggaaacattgaccaggccaagaagtcctcagctatttccttgatagtcacagagctctttgctgtgaccttctgcgtcctgctgctaggctgtaaggatctcgtgggctacattttcactaccgatcgggatatcgtggccttggtggctcaagtgatccccatttatgctgtgtcccacctctttgaaggtcttgcttgtacctgtggtggtatcctgaggggcactgggaaccagaaggttggagccatcgttaatgccatcgggtattatgtcattggcctccccatcgggatcgcgctgatgtttgctgctaagctgggagtgatcggcctgtggtcaggcatcatcatctgcactacctgtcagaccacgtgcttcctggcttttattgctcggctcaattggaaacgcgcctgtcaacaggctcaagtacatgccaatttgaaggtaaacgtggccctgaattccgctgtctctcacgagcctgctcacccagtgtgtcctgagagccatggagaaattatgatgacggatcttgaaaaaaaagacgagactcagttggaccagccg

SEQ ID NO: 104 - DNA, 613 bp, Homo sapiens
  misc_feature (1)...(613): n = A,T,C or G
cgcagctgtatgcacaaacaggcgggcatgagtnccagccagncacgccctggngcttggcatgttcgnnncaggtaaangaccccgaggtacaaggtcatcctggcccgncngtatggntctgagggcaggntcaccttcacctcccacacccctggtgagcaccagatctgtcttcactcaaattccaccaagttctccctctttgncggagggatgctgagggttcaccttgacatccaagtgggcgaacatgcaaacgactatgcagaaattgctgccaaggacaagctgagcgagctgcagctgagggtgcgacagctggtggagcaagtggagcagatccaaaaggagcagaactaccagcggtggcgagaagagcgcttcagacaaaccagcgaaagcaccaaccagcgagtgctatggtggtncatcctgcagactctcatcctcgtggccattggcgtctggcagatgcngcacctcaagagctttttttgaagccaanaagttgggngtagcaacctgtcccaagcctcacaggcgatntttntttcaggctgtgggaagtaagaagangactgggttttaacccgcaaatgttcttggagga

SEQ ID NO: 105 - DNA, 612 bp, Homo sapiens
  misc_feature (1)...(612): n = A,T,C or G
aacttcaagtcataagtttagtagaccaagnaggcacattcgaggtgctgtggatgctgctgtcccaactaacatcattgcggccaaggctgctgaagttcgtgccaacaaagtgaactggcagtcttatcttcaggggcagatgatttctgctgaagattgtgaatttattcaaaggtttgaaatgaaaagaagttccgaggacaagcaagagatgcttcaaactgaaggcagccagtgtgctaaaacatttataaatctgatgacgcacatctccaaagaacagacagtgcagtacatactaaccatggttgacgatatgctgcaggaaaatcaccagcgtgtcagcattttctttgactatgcgaaacgaagcaagagcactgcctggccatactttctgccaatgttgaatcgccaggatccctttactgttcatatggcagcaagaattatcgccaagttagctgcttgggggaaagaactgatggaaggcagtgacttaaattactattttcaattggataaaaactcagctgagttcacagaaacttcntggcagcnggtgtttgctgttgaaacaggaacaaatctcttcaagtgatagtttgc

SEQ ID NO: 106 - DNA, 612 bp, Homo sapiens
  misc_feature (1)...(612): n = A,T,C or G
actgttcgatatgatatcctgcccttatctcctttgtcccggaatcgcctagcccaggtgaagaggaagatcctggtgctggatctggacgaaaccctgattcactctnaccacgatggggtgctgaggcctacagtgagacctgggacacctcccgacttcatcctcaaggtggtaatagacaaacacccagtccggttttttgtacataagaggccccatgtggatttcttcttagaagtggtaagcnagtggnatgagcttgtggngtncacagcatgcatggaantntatggctctgctgnggcagataaactggacaacagnagaagcattcttaagaggagatactacagacagcactgcactttggagttgggcagntacatcaaagacctctccgtggtccacagcgacctgtccagcatcgtgatcctggacaactcccccggggcttacaggagccacccagacaatgccatccccatcaaatcctggttcagtgaccccagtgacacagcccttctcaaccttctcccaatgctggatgccctcaggttcactgctgatgtccgatcggngctgagccgaaaccttcaccaacataggctt

SEQ ID NO: 107 - DNA, 611 bp, Homo sapiens
  misc_feature (1)...(611): n = A,T,C or G
gagatgaggctgccgtcccgaacaacaagaatcactgtantgggcgttggacaagnggntatggnatgtgccatcancattctgggaaagnctntggctgangaacttgccctggctggatgtgttggaagacaagctcatnggagagatgatggacctgcagcacgggagcttgttcctccagactccgaaaattgtggccgataaagattactctgtgacagccaactctaagattgtggtggtgacggcaggagtccgccagcaggagggggagagtcggctcaacctggtgcagagaaatgtcaacgtgttcaagttcatcattcctcagatcgtcaagtacagccctgactgcaccatcatcgtggtttccaacccagtggatattctgacttacgtcacctggaaactgagcgggctacctaagcaccgtgtgattggaagcggatgcaatctggattctgctcgattccgctacctcatggcagagaagcttggcattcatcccagcanctgncacggatggatcctgggcgagcatggagactncagtgtgggctgtgtggaaccggggtgaatgtggcaagaantctccctccagaactgaa

SEQ ID NO: 108 - DNA, 608 bp, Homo sapiens; identical to SEQ ID NO: 13
  misc_feature (1)...(608): n = A,T,C or G

SEQ ID NO: 109 - DNA, 606 bp, Homo sapiens
  misc_feature (1)...(606): n = A,T,C or G
ctctgccttaccttcncaagggcagaaaanaccaggcncaacncttntgctacanggtttgtcgcacaacgactcntntggccgtatttcagaaaacacanggctccnnacaaattgtgncaaanggnaatgtatgtanggaagaatgcatggnatnngnttnntntattancccancatgcntnggtgtnagacactttctgnaatgtagngtccatggcnggaggtattcacaacaccgaccctatgggnncnttccntgctcctganggatgatgacaaactnngaacagcggtaccgatgatattcctgntngggaccnanaattcctgaaagttgaccaagggaacactttnttgaacttatnctggctgcnaactacttaaacatcaaaggtttgcttgatgtcacatgcaggactggggccaatatnattaagggggaaaactcctggaggagattcgnaaaacctttcntgtcnaaaatggantttactggaagaggnngaggcccaggtncgcnaagagnaaccnanggngnggaanagaagggaactgcttgggcctgtcccctgtgaacantagaaggggttgttcccaaaatgc

SEQ ID NO: 110 - DNA, 598 bp, Homo sapiens
  misc_feature (1)...(598): n = A,T,C or G
actgaggtgttacagtatctgaacagatggctgggaacgaattctggggttcagcaatgccacattccagtcagagaaggagactggggatcggaattacgccatcggctattacctcaaggagaagaagtgcttccctaagggtgtggacatgatggctgcccttgatctctatttccagctgngctctgnggaggttacctgtgagtcaggcanngtcatggcggccactctggccaatggcggcatctgccctatcacaggggagagcgngctgagcgccnaggccgtgcgcaacaccctcagcctcatgcattcctgtggcatgtatgacttctcgggccagantgccttccatgtgggcctgccagccaagaccctgtgtcaggagccatcctcctggttgtacccaangtcatggncatgatgtgtctgtcgccgccgttagacaagctggggaacagncaaaggggcatcaacttctgccagaaggtgnaggnctctctttaacttccacanntatgacnacctgcgggactgcggctngggaanttagacccncggaggggaagganaaanaggtttcggaacaagaccc

SEQ ID NO: 111 - DNA, 598 bp, Homo sapiens
  misc_feature (1)...(598): n = A,T,C or G
tgagccgtggcgctaggatgggtaacaagngctctccgtgctcatgtggaaacagcgcaggaanactggngtctttcagcttaaagaccgtggtctgaccgagttcccctcagagttgcagaagctgacangcaatcttaggaccatcgatttatccnncaacaagatcgacagcctaccgcctctgataataggaaagttcactctgctaangagcctctncctcancancaacaaactgactgttctacctgangaattatgcaatctgaaananctagagacactaagtctcaacaacaatcacctgagagagctaccatctacctttgggcagttgtcagccctgaagacgctgagcctctctgggantcagctgggagcattacccccccagctttgttgcctgagacatctagatgtagtaganctctctaaaaaccagantcggagtatacctgacacagttggggagctgcaggccatcgaactcaatctcaaccagaaccagatctctcagctctctgtgaagatatcctgctgtcctcgcctcanggtcctccggctggaagaganctgccttgagctcagcatgctt

SEQ ID NO: 112 - DNA, 598 bp, Homo sapiens; identical to SEQ ID NO: 14
  misc_feature (1)...(598): n = A,T,C or G

SEQ ID NO: 113 - DNA, 596 bp, Homo sapiens
  misc_feature (1)...(596): n = A,T,C or G
tgagagatgccctgtattaagctaatatggaacaccagcaacgagcccaggaccgcgtgaccacctgaccggtgatcccctggcccttgagttcggcaagcctaccatggacctggccagccccgagacagcacctgccgcacctgctacactgcccagcttcagcaccttcatggacgggtacaccggagagtttgacaccttcctctaccagctgccggggacgacccagccgtgctcctcagcttgttcctctgcctccnaagngctnngattanangcntgcgccnannttncttatnannagnaacttcaagttngangacttaaaggtgtacggctgctacccgggcaccctgagcggcccattagatgagaccctatcctccagcggctctgagtactatggnagtccctgctcagncccctcgccatntacacccaacttncagncgtnccagctttntccctgggacggtttatttggcnnnttntccccgagccaaacttatggaanggcctnntgggcattggacagaanagttgccntaaangctttttttaaggngcttnnggccaccttacaaaacctttgt

SEQ ID NO: 114 - DNA, 596 bp, Homo sapiens
  misc_feature (1)...(596): n = A,T,C or G
tgaggatatgaggaagantggagacgattcgatgtccagcacccaagcctctaactcagaggaggatctccctgaagattaccccgtggtcaaaaacatgcttcacaggctgacagctgacctgacgctcgaccctcgcacagcacaccgtgatctgctcatctcctctgactaccgcggcgtgagtctggctccacccggaacgcctgcgccgctggacagccccgcgcgcttcgatcagctcccggcggtgctgggtgcgcagggcttcgcgtcaggccgccactgctgggaggtggagaccgcggaaggcgcgtccttcagagactctacagctcaggatgagaacgcgggagagagctgctacgccgtgggcgctgccggggagtccgtgacccgcaagggcctcatcaagctgtgcccatcggaggctatatgggccgtggagggccgcggcggccgcttgtgggcgctcacggctccagagcccaccctgctaggtggtgccaggcccccgccgcagcgcattngcgtggacttggactgggagcgggggtcgtgtggccttctatgacggccgctcatttggacttgct

SEQ ID NO: 115 - DNA, 592 bp, Homo sapiens
  misc_feature (1)...(592): n = A,T,C or G
acctgagggtggaaagataacagaccngtntgaaacccgtanacgtgggggcgctatcgaagtgggttgggaagatacccccggacgtcttacaagacatggccgtgattgcacccatgctcgccaagcttggatatgactccatacgccaatcctcctaactacggaaaacctgaccccaaganccttgaaaacaccaggagggtctataanggagaatttcagctccctgactttctgaaagaaaaaccccagacggagcaagtggagtaactgagcccgtaacttcccacagggacgactgctgccttgtctacagaagggaaatctcgggaacggctgtctgctgcgacaaggagtgtctgtgcccatcgctcctgttcacctgccagcctcctgtccccagggggggtgtcacacacccgggcctccccaagtgatggctcttgagcccaggaacatgcatggccctnaggatgaggagcccagcagggacacagttctgtcacagctcctcttgtccttgtctttccttcccaggtnccagtctttaatttcaaggaaaggagagtttgaagttggcattctgtta

SEQ ID NO: 116 - DNA, 589 bp, Homo sapiens; identical to SEQ ID NO: 15
  misc_feature (1)...(589): n = A,T,C or G

SEQ ID NO: 117 - DNA, 581 bp, Homo sapiens
  misc_feature (1)...(581): n = A,T,C or G
ctggacccagaaaagcttggcgtatcttgtgaagtcatcgatgctgcggtcaattgtgccttgggaatgnggatacagtttgcaagtctgtgatcaaaaccggtgcgactgttgatgcagccacgtaggctcccttaacaggcggctttgcctctgagatcagctccacggtccaggaagaatgtttcttgaacctagaggctccaatatctcgagtttgcggatatgacaccccgtttnctcacatctttgagcccttttatatcccagcacaaatggaagtgctacnatgcccttcnnaagatgatcaactattgacgacagagaaaaccaggaagatcatgaccagacatggaaatatttttctgaaacctttttatatttccttatactnctttcttcttacatatagagntatgcnacnanctgtcatggatattggctgangagctgcnaattacttatcatgttantataaatggattgagngcncaggaaggaatgctttaaggagtgcgtgggcggaaatcttaagactgtttcangactataantaccggggngggggtggattcaataaa

SEQ ID NO: 118 - DNA, 580 bp, Homo sapiens; identical to SEQ ID NO: 16
  misc_feature (1)...(580): n = A,T,C or G

SEQ ID NO: 119 - DNA, 580 bp, Homo sapiens
  misc_feature (1)...(580): n = A,T,C or G
tgaggtgagtgcaggatccgcatccggatgtggtggtccttgatccttctttcttgcctgctggcactgaccagtgcccatgacaagccttccttccacccgctgtcggatgacctgattaactatatcaacaaacagaatacaacatggcaggctggacgcaacttctacaatgttgacataagctatctgaagaagctgtgtggcactgtcctgggtggacccaaactgccaggaagggttgcgttcggtgaggacatagatctacctgaaacctttgatgcacgggaacaatggtccaactgcccgaccattggacagattagagaccagggctcctgcggctcttgttgggcatttggggcagtggaagccatttctgaccgaacctgcattcacaccaatggccgagtcaacgtggaggtgtctgctgaagacctgcttacttgctgtggtatccagngnggggacggctgtaatggnggctatccctctggagcatggagcttctggacaaaaaaaagggctgggttcagggggagtctacaatttntnatgnnggntggttaccataaaccaa

SEQ ID NO: 120 - DNA, 579 bp, Homo sapiens
  misc_feature (1)...(579): n = A,T,C or G
tgaggaactggtgtccttaccgaagtccggctggtncctttgtagctgcttgcaaaacagagaaattcctggtccattcacagcagccatgtccacagggagcccctgactgccagggagtcagagtcatgtatcgagtggcccagaagccagtgtaccaggtccagcagaaggtgctgatctctgtggactggcggtgctgcccagggttccagggaccagactgccaggaccacaanatcccagcttacnntntttnngctcaanctccntccaaantgntggnantncggnannatggatactggtccatnctcaggcactttagaagggccaagtnaccctaaaattgcctctagaattttggctgggggagaacttgcatattgnttactaagggaacaataatatttaatagactgatttatttattgttaccacnaacantgaacacttgcagcatcaagagaaccacaccttaaattgagtacactatgtttttaattcaaatggatatacttggatttatgatgcaactctgaactgtacaagaaataaantttagaaccatttaaatat

SEQ ID NO: 121 - DNA, 577 bp, Homo sapiens
  misc_feature (1)...(577): n = A,T,C or G
attttttgagattgcccaagttttgaagtacttcctcagaagatggtaccacccggagcccgcaggagtccttcagtcaccagtgtctacctgtggaggcccagcccgagcgagagtcacagaatcttctggaagaaaatgcccttcctgctctccaggtttcttncgttcccctgaaggacagatcaggagctgacagattcactcctctnagatggtctnccataagttggtgaaaactgaagatgtggctgatgtacctgtgtccttcatnctggaggaatggtgcacatttgnaccagaacccagaagtctactnganggggacagcaggaaaggaggatgagtgagagnaccacatcctgtnggnnatcactntnnanntttnantggnntgncacttggttcntgaaaccaggggtggagtncgacncnactgnngtccaantgtttctgnctcccgaangnnggaattnaggggagggngcnntcnctcctggcnagggacnannttnaatnatgngtgggaancnccctnctggnnaaggannaatcntnnnctgggagggcagcaaac

SEQ ID NO: 122 - DNA, 574 bp, Homo sapiens
  misc_feature (1)...(574): n = A,T,C or G
ccaactactaccgcacctggnaacgtcgtggtccatgactggctgtacagctatgtgtatcaagatgggctgtggctcttaggcaggcgggctcgcggggtggccatgctgggagtgttcctggtgtctgcggnggttcatgagtatatcttctgcttcgtcctggggttcttctacccggtcatgctgatgctattccttgttttcggggggctgctgaatttcaccatgaacgacaggcacacaggtccagcctggaacatcctgatgtggacctttctcttcatgggccagggcatccaggtcagcctatactgccaggagtggtatgctcgtcgacactgtcccctgccccanacaacattctgggggatggngacaccccgctcttggtcctgccatccctanaagtcaaggcttcatgctacacaaangaacagnatcaaagctntttttttgccttgcaaaagccaaaaacnagggttcccncactacctnatttgggangcagggactttgcnaaaaagaacccttccagggggccatgggggactaaggacccccccttttgggg

SEQ ID NO: 123 - DNA, 569 bp, Homo sapiens
  misc_feature (1)...(569): n = A,T,C or G
attctgttcagcggagcttttagccccagccccacagaagtttncatttaaaaaattatctgtcaaaccagggaagtggaggcccaggcctttaatcccagcactaaggnaagcagtaggcagaaggttctcggaagtcacctttgtgtgactgtatggcctcaagatggcagtcaccttcattggaaacagcacagccatccaggagctgttcaagcgcatctctgagcagtttacggctatgttccgccggaaggctttcctccactggtacacgggtgagggcatggacgagatggagttcaccgaagctgagagcaacatgaacgacctcgtctctgagtaccagcagtaccaggatgccaccgcggaagaggaagaggatttcggagaggaggcagaagaggaggcctaaggcagagagccctgcatcagctcaggctgcttagatccctcagctttctccaactgccctttgtcctccagnttctttctgctgcctntgtcttgtatttgttttgntctgttttcttattggggnnaaatggtgcctggcacatggcaggcac

SEQ ID NO: 124 - DNA, 568 bp, Homo sapiens
  misc_feature (1)...(568): n = A,T,C or G
tgaggcatgtggcgaccccagggctaaaccctcctaccttattgacaaaaacctgggaatctgctgtgaaattcatagtcagaaaatttcctgctgtagaaacgcgcaacaacaatcaacagctggcacagctacagaaagaaaaatcagagattctgaaaaatctggcgttgtattactttacatttgtagatgttatggaatttaaggaccatgtctgtgacttgctgaatactattgacgtttgccaagtcttctttgatatnactgtgaactttgatttaacaaagaactacttagacttgactgtaacctatacaacattaatgatactgctgtcccggattgaagaacggaaggcaatcattggactatacnattatgcacatgaaatgacccatggagcaagggaccnagaatatccncgccttggtcagangattgtggactatnaaaaccctttaaaaaaganganggaagaatttgaccccatagcnagtctctttcagatgcgctaatttctcttcagangggggatcctagacggaacctttcagcagacccgtgg

SEQ ID NO: 125 - DNA, 564 bp, Homo sapiens
  misc_feature (1)...(564): n = A,T,C or G
acctgaggcctgactaccccgcgggtacttncaggccagcntaactttcggntgccngcactggggctgtcaggcgtttccnggaaggatccagganccccttanctaatccaggcagtgacctggganaactcggnagancccgtggcagccctcagcatccagctggtgaacctgattcctgntttccggntaggccttcagatgtgttttgctgaatatcactttcagaagatcccggctaaacttcttctgtacattgctgaggatgtcgtacacgactctctccagtgggaccagggcttcagagttgcctgaagttccaggaccaacttgaagatagagaagcaaacaggattccccgagttctgtcctcacatgacccaactgcctctggctctgggatttggaggtcttcatggagctgagtggcagccttcaatacttcctcgtatatgaccattaaaaaaattaccaacaccctatttggtatatttgatggaccttactggagcaggaaaaatttgaataaacttaaagtgagtatccataggaaaaaaaaaa

SEQ ID NO: 126 - DNA, 564 bp, Homo sapiens
  misc_feature (1)...(564): n = A,T,C or G
aaccctttacctttgctggagaggttgaagaggaaagtgaagctgttaaagaaagtgaagaaactgaaccgaaacgtcaatgaaagaatttaggtgtcaggtgantgactgttctangattttccaagcanttactggcctaatacagcactacatgaaacttcatgaaatgacccccgaggaaattgaaagcatgactgctgctgtggatgttggcaaatttccatgtgatcagttggagtgtaagttgtcttttacaacatacctgagctatgttgttcatcttgaggtagaccatggaattggaacaaggacaagtaaggcagaanaagatggcatatacaagtgtgactgtgagggctgngacaggatatatgccactcggtctaatcttcttcgacacattctttaataaacataatgacgagcatanagcccatctngattcggccaaagaaaattaactggccagganaatatatnaagtaanggtaaaccaagcaaaantcaaagtctaaacatcggacaacaaaaaccccaacagatccgggaaagacgggaatg

SEQ ID NO: 127 - DNA, 563 bp, Homo sapiens
  misc_feature (1)...(563): n = A,T,C or G
gagacaaggtaaggttactcggcaggcagttaaacccaacagtgtaacttacaggaccaaatctggcancatcttgctgcataagncaaccattancagggaggctacccggttacggagccgatggctgacatatttcatggccgtcaagtccaatggtagcgtctttgntcgagattcctnccaggtgcacccactagctgtgttgctcctaacagatggggacgtgcacatncganatgatgggcgtagggccaccatctcattgagtgacagngacctgcttcggctggaaggtgattcacgaactgtgcggttgctaagggagtttcgtcgagccctaggacggatggtggagcggagcctccgcagcgagttagctgcacttcctcttaatgngcagcaagaacacgggcagctgcttgcactgctggcagagttgcttcgaggaccttgtggcagctttgatatgcgcaagacagctgatgactgagcctctcttccgctggggctatgtacagagtgcaaatgtttatttaaaataaagttatatttatcccttg

SEQ ID NO: 128 - DNA, 557 bp, Homo sapiens
  misc_feature (1)...(557): n = A,T,C or G
tgaggatcctgacaggctgttactgatgtatcccgtgctaaggacctttaccctctggctccactcttccctcactgggatctatgtctctggctcttattccatcgtttttgtcaactgtcccaatgagcaaattgccagagacatcgccagggccatcctggataagaagatggcttcgtctgtgaacatcttgccgaagacctcttctctgtacttttggaaaggagaaatagaagaaggcattgaggtctcactgctaataaagacaaagacttccaaggtctcccggctgtttgcctatatgaggttggcgcatccttttgaaatcccagaggtcttcagtattcccatggaccaaggagatgctcgctttttacgatggcttgaggagggaatgaaggagaactaaggagagagaaccttattgtgcaggcttctgcctctagcctttgttgactgtgttctgggaaaaagcaggcctccttctgcctcccattgaatgttcctaacagcagacaggntctagctgacctgngcatgctgaatgaagggct

SEQ ID NO: 129 - DNA, 554 bp, Homo sapiens
  misc_feature (1)...(554): n = A,T,C or G
agttctgctccaactcaaccgngctgctgtaaggcacagnangcagctgcccctggtgggggtcctcctggtcctcctcccaacatggaccagtaacaggcggttacagcagtacccaggcacaagtggaggaggtggtggacatcatgcgtgtgaatgtggacaaggncttggagagggaccagtaagttgncagagctggatgaccgggctgtcgccttgctggccggagcatcacaatttgagagcagtgctgccaagctaaaaaggaagtactggtggaaaaactgcaagatgatgatcatgctgggagctatctgtgccatcatcgtggtagtgattgtaagaatgaanatatcctttggctacagaaatgactgcaaaaatggtcacccaagaaactggaatttccccaggaatctcatgctgggagaaagaaaangccgaagcctgtgccagccaggaggaccctgtgtctcggtgntgtttacattttgnanaccatgctggtncttaaactctgngntccacctgnctttgccacctgaatgctt

SEQ ID NO: 130 - DNA, 550 bp, Homo sapiens
  misc_feature (1)...(550): n = A,T,C or G
cgtttatggcaatgttgccaggtactttggaaagtaagnanagaagcaagnacgggcacactcaccagtggnactgtgtacgtgaagccctacagaaacgaggnngtnttcgcttttgcccgngaangagtgttttgcaggtgcnnnctgtnnnnctgacatnctacttgnagttgtgtcnagnanctttcttctagaatgacgngggcccgttgtngactcncaccantacatcccatcagatatcttttcattgacccccangananncctgtgactctgnaccacttactgaagctcttccagtctgacaccaatgccatgctggggaagaaaacagtggtttcagagttctatgacgaaatgatatttcaagacccaacggcaatgatgcagcagctgcttacgacgtctcgccagctgacattgggagcctataagcacgaaacagagtttgcagaacttgnngtgaaaaccagngaaagttagaagctgccaagaaganaacaagctttgngattgcgggagcttaagggggagattaaaagca

SEQ ID NO: 131 - DNA, 548 bp, Homo sapiens
  misc_feature (1)...(548): n = A,T,C or G
acagcgagcagcactaaggctttcgtgggaggcacaaaacaagnattactgtgccatttcttgagcaatgtccaatcaggaggtttatacaaggagagaatgactgagctgtacgactaccccaagtacagctgccacttcaagaaaggaaagcggtacttttatttttacaatacaggtttgcagaaccaacgcgtgttatatgtgcaagactccttagagggggaggccagagtgttcctggaccccaacacactgtcggatgatggtacagtggcactccgaggttatgccttcagtgaagatggcgaatactttgcctatggtctgagcgccagcggcttccgactggggtgacgatcaanttcatgaaaggtcgatggngccaaagagctncccggatgtgctggagannagnnaagttcacctgcntgggcctggnnncntgacgggaaggggatgttttttannttttacccccannaggacgggaananggangggnccaaaanctcccccantntcccccaaaaggttttgtttccacg

SEQ ID NO: 132 - DNA, 548 bp, Homo sapiens
  misc_feature (1)...(548): n = A,T,C or G
ccgccgcctccgacggctggcngtgttnngaagaataagactcgcacagcgtccacccctgtcaacacgccctccagacctccttccagtgaattcttggacctgagttcagctagtgaggatgactttgacagtgaggacagcgaacaggagctgaaggggtacgcctgccgtcactgcttcaccaccacctccaaagactggcaccacgggggccgggaaaacatcctactgtgcacggactgtcgcatccacttcaagaagtacggtgagctgccacccatcgagaagcccgtggaccccccgcccttcatgttcaagcctgtcaaggaggaggacgatgggctcagtgggaagcatagcatgaggacgcggcggagccggggctngatgtctacactacgcagtggtcggaagaagcagcccaccagtcctgatggtcgtgcctcacccatcaatgaagacatccgatccagtggccggaactcccccagtgctgctagcacttgcagcaatgacagtnatancanagacagtgaagaagtcag

SEQ ID NO: 133 - DNA, 545 bp, Homo sapiens
  misc_feature (1)...(545): n = A,T,C or G
acctgagggccctctttctctgctgtcctgtcgtaggaccataacggaggactttcgggtgccatttcaggatccgggataggaaattagcaaaagccggccnnncaggatgtncntaagagngtgaagattcaggaaggancnttcngggaccnacaatagctnttnnccagtgaacagcttttctggccaagaggcttcacgacattttagggattcttgttaccaagagactcctgaaccttggaaagctctgagccattgtgggaactctgcagacccacacacagcaaggagcagatcctggagctgctggtgctggggcagttcctgaccatcctatcttaggagttgcaggcctggctctagcagcagcacccagacatcaggaaggaggcggtggctagtcttgaagacctttgcaagcccanaaaggaggtgagatgaggattggggttctagacacttaatactgaacgaagagcagagtttgctttggctttgggttacaagccctgcggttcccttgttttttgtgtaaacaa

SEQ ID NO: 134 - DNA, 544 bp, Homo sapiens
  misc_feature (1)...(544): n = A,T,C or G
tgtgacgacttgttcacanntaccaggctgcaagcancttgctggagcncntactgcnnactgccntggtacagcactcanatgcttctgnacgaactacggcancatgannaccccaggaantttgatgntctggaatagcntggtncaggncttgtcagncagtgtaaggcacacttcttgctctctgcggtagntctgagntgggangancctgcctatagcctggntctggccagcctggcactacnctnctngntncagccccacctaaccanggttgggtnttgggacggttggagcngggccctggagggcttcccganagacagcccaggtnagaaggaggctacttanacctacgacgcctaattcccctcccctggntcttcttcattntgagctgagngggctgcccctgcctggctcctgagggttccctancaaaggtgggggcnnaaaggantcattatcttttgantatctgcatttaaaactgctccaggggctggagagggcttgatgcttttccagaggacccaag

SEQ ID NO: 135 - DNA, 541 bp, Homo sapiens
  misc_feature (1)...(541): n = A,T,C or G
tgagtgtaaatgagcaagatggacctggaaggtgggggagacgggcagaaagccccgagcttccagtggcggaactacaagctcatagtggatcctgctttggaccctgctttgcgcaggccttcccagaaggtgtaccgctatgacggagtccacttcagtgtcagtgactcaaagtatacccccgtggaagacctccaggacccccgctgtcatgtcaggtccaaagccagagacttttccctcccggttcctaagtttaagctggattgtacatantgttaatagngaaaccnaacaccacatttttatanttgggattaaactttattgtacggaaaccttantnaagganangnnccaaaaaatatgganaggngnaagaagnggagatccttcttcatccccgcactcgaaagcacctaggcctggcccgtgtgctcttnaccagcactcggggcgccaaggaaactgtnaaaaacctccacctnacctntgtcatgggcaacatcattcatgcccagcttgatatcaaaggcca

SEQ ID NO: 136 - DNA, 531 bp, Homo sapiens
  misc_feature (1)...(531): n = A,T,C or G
aggttgtcataatacagnacttggnaaactctgcaagcacttagcagtcagcatttcgagcagcggaagcgagggcatgctgtgagtttccaatgagctgtcacaatgtcagaatgcagttcagacagcagcagcacagcgctcgcagacattaaaacgtaagctgtgctagaacaaaatgcaatgaaagaaacactggatgattgaaaagccctgctttgcagcccctcagcatggcaggcctgcagctcatgacccctgcttcctcaccaatgggtcctttctttggactgccatggcaacaagaagcaattcatgataacatttatacgccaagaaaataccaggttgagctgctggaagcagctctggaccataacacaattgtgtgcttgaacactggctcagggaagacgttcatcgcggtcctgctcaccaaagagctggcccatcagatcaggggcgacctcaacccgcatgcaaaaaggaccgtgttcctcgnaaactctgnaaaccaggttgctcaacaag

SEQ ID NO: 137 - DNA, 530 bp, Homo sapiens
  misc_feature (1)...(530): n = A,T,C or G
gtacctgcggttctctgnnttctgcagttcggcactggnaaaccattcaccgtaatgtcttaggaaaacagttggagcaactgcagcccctaacaggaagcccttggaaggctgcaccttggctcatcgttgcctagtgcgtcacaggagcccttggcttcaagcgcctcccatgtgaagtgtgtgtgctacggtcttgggacctttgcctcctgccccactgctcggatccagcttgcttttatgcttctctttctagagaagtgccaggtccccagaagtcactgctgggtctatgaccctctgttcagtcagactgaggtttccgttctcacctccctcggcgtgactgtcctcagtgagaatgaggaaggcangcgcnntgcncnnngncagnnnactgtgttatacatgncncnntgtgggacanctgtntacaacaacctgctgtggagnaactggtctgcngacnccgtgngnagggngctcatcntagggaacagttnacgaggccttgaggaaaggttgtt

SEQ ID NO: 138 - DNA, 526 bp, Homo sapiens
  misc_feature (1)...(526): n = A,T,C or G
cactgacaaactggccttcgatgttggccttcaagaggataccacaggggaggcttgctggtggaccatacatcctgcctctaagcagagatcagaaggagaaaaagtgcgtgttggagatgatctcatcttggtcagcgtgtcctcagaaaggtacttgcacttgtcatatggcaacagcagctggcatgtggatgctgccttccagcagaccctctggagcgtggcccctatcagctcaggaagtgaagcagcccaaggctatctcattggcggtgatgttctccggctgctgcatgggcacatggatgaatgtctcactgtcccttcaggagagcatggtgaagaacagcggagaacagttcattatgaaggtggngccgtatcagttcatgcccgctccctctggagactanagaccctaagagtcgcgtggagtggaagccacataagatggggccagccattccgactccggcatgtcacgacntggaaaatacttangcctcatggaagacaagaacaa

SEQ ID NO: 139 - DNA, 515 bp, Homo sapiens
  misc_feature (1)...(515): n = A,T,C or G
gtgacttattactatnncagcagaacctgcctccccagcagattgccagcacctatgacatcatccccttcttcgtctcattctgtggtctcctaaatgctcatctcgttggcctgggttcagttggtggtatggaggggtgctgcttagcactgacctgagagtgtgtgtgaaacccactgacccaatggacatcaaaggccagttctggaatgatgatgattcagaaggagataatgaatcagaggaatttctgtatggagttcaggggagctgtgcagctgacctgtatagacacccacagcttgatgcagacattgaagcagtgaaagagatctacagtgagaactccgtgtccatcagagaatatggaactatcgatgacgtggaccttgacctccacatcaacatcagcttcctcgatgaggaagtatctacagcttggaaggtccttcgaacagaacctattgtgttgaggctacggttttctctctctcagtaccttgatggaccag

SEQ ID NO: 140 - DNA, 515 bp, Homo sapiens
  misc_feature (1)...(515): n = A,T,C or G
gattcggggcttgctccttgttggnaatgtangaacttggangtacacgtcctctgggtcttccggtccctggaagnaaattagtgctgggcgngtctacntaagtgccantcagcaactttgttaccaccactctctgaactggaccaggacttctgcgggggcccgcagaggagagacttgacatcaagtacaaccggcctctgggagaatgcgtggcagagggcaaagtgtgtgatccactgtgctcctctgggggatgctggggcccaggccctggncagngcttgtcttgtcgaaactacagccgngaaggtgtctgtgtgactcactgcaacgttctgcanggggaaccccganagtttggtcatgaggctcattgcttctcctgccatccagaatgccagcccatggagggcaccagcacgtgcaatggctcnggctncgacgcttgtgctcgatgcgcccatttttcgggganggggcccactgtgnggaacagttgcccccatggg

SEQ ID NO: 141 - DNA, 512 bp, Homo sapiens
  misc_feature (1)...(512): n = A,T,C or G
acattcaggacctggngaaaatccaccntnattaaacgagactcagtncntnnncaacctggtantgagggatcnncngncnctttcatttcnaaangntgngcacggaaacaaatactaatgaacgcatctctntgcgccggggtngtggaaaantgangaaggggaggtatnaaggnnaaaatntaacttgggggacacgcctggctttggggactntgtggantggtcaaactgctggctgcctgnggttcgctttattgaggagcantttgagcaatacctcagggatgagaggggcttgaacaggaagaacatccagggattccaggagtccattgntgcctctacttcatataaccctttggccgagggctccggcccctagatgnggctttnctccggggcagtgcncgagaaagtnantatnatnccgggcattggnaaancaaaacgcccttgatgcctaggggagactnaggcccttcaagcagaaaaaccggggaccagtt

SEQ ID NO: 142 - DNA, 507 bp, Homo sapiens
  misc_feature (1)...(507): n = A,T,C or G
aggacccatggcgcactcagtgntncagatgcnaggtcaagagaccctttcagaaanatgacttcttatttataaactgcacttattgcaaccacagggtacccgactnttttctggtatgtccaatattctggagaaggtccacagctccttctgcaagtcacaactgccaacaacaagggaagcagcagaggttttgaagctacatatgataaaggaaccacttccttccacttgcagaaaacctcagtgcaagagatagattcggctgtgtactactgtgctatgagagacacagtggcagaaactgcaggggcagctgagcataaagtctgagaagcaaaagaaagcctgacttttgataattttccttttgaatcatcctgtttgcatgcagtctgtgttgtgtaccaacatttctctagttgatgaaagtcaaacaaatggtcagagcagaatacaaaatagatgatactacaactgtatttttgtacaggaaattagacg

SEQ ID NO: 143 - DNA, 498 bp, Homo sapiens
  misc_feature (1)...(498): n = A,T,C or G
acccacactttctcaangaatggtggcngtctggcatgcacctgctgatcnnnnccacanccatctggaagagctctgtccaccttctttctgnaccaacggggntnantgctatgngnaggcctnaggccgcccacagngctcctgcgancctgggtggacaggntgagcaatgccagctcnganacttctgnttanccnacccctnngccaacggaggcgtgtgcctgggcacatacccacananccagtgcnggtgtccacctgggttcnagggtcacacctgtgaacgcnacatnaacgagtgctttctggagccgggaccctgccctcagggcacctcctgccataacaccttgggttnctaccagtgtctctgccctgtggggcaggaaggnccccagtgcangctcaggangggagcctgccctcntggaagctgtctcaatgggggcacctgccanctggnnccagagggacactccacctttcatctct

SEQ ID NO: 144 - DNA, 493 bp, Homo sapiens
  misc_feature (1)...(493): n = A,T,C or G
catgcccagttgctgtantcccnnatagtgattgagcaaaatgggggactccttcaccatccagacgtgcagcagcctcagggaactaccttgtaaaattcaaagttggagaagagtttgaggaggataacaaaggcctggataacagaaaatgcacgagcctggttacctgggagaatgacaaactcacttgcgtacagagaggagagaagaaaaacagaggctggagccactggatcgaaggggaccagctccacctggaaatgttctgcgaaggccaggtgtgcaagcaaaccttccagagagcctgatacatctccagcaacagagcccgcttgaggcaactactcaatgccaagttatctcgtagaaggaacgggtgtttgtctgttttgggttgatgaagggtcttgtcattggaaagatgtcacacagcctgtatganaaactgtttgatttcaggacagtttcagctccaataaacctgctcaag

SEQ ID NO: 145 - DNA, 491 bp, Homo sapiens
  misc_feature (1)...(491): n = A,T,C or G
catgcctggccagggntcttgttcccccccaaggaaactggtgaaggaggagganaatcttcaggtacccttcacagtgctgcagggtgagggagtggaattcctgggccgggcaaccgatgccctcattgccatctctaactaccggctgcacatcaagttcaaagactctgtcatcaacgtgcccctccggatgattgacagtgtggaaagccgtgatatgtttcagttgcacattgcctgcaaggactccaaagtggtgaggtgagcacagcgggtctcgttcatggnctctgaccctcgccttgtgcanacagacagacctctctgttgcacgctacccttggagtaagaggatcgactccactttctgttccccactggaggaaaaggggacaactcacttccccgttcttagtcagaaggtcaattggctaacccattctgtcttgacttgaaataaaatggggatggagccgtaaaaaaaaaaa

SEQ ID NO: 146 - DNA, 491 bp, Homo sapiens
  misc_feature (1)...(491): n = A,T,C or G
ggcaataaggccctgcnctgctgggaaacattgatgatgccttacagtgctactctgnggcaattaaactagatccccagaaccatgtgctctacagcaatcgctctgcagcctacgccaaggaaaggagactaccaggaaggcctatgaggacggctgcaagactgttgacctgaagcctgactggggcaagggttattcaagaaaagcagcagcccttgaattcctaaaccggtttgaggaagccaaacgaacctatgaagaaggtttaaaacatgaagccaataatctccagcttaaggagggcttgcagaacatggaggccaggttggcagagaggaaattcatgaatccattcaacttgcctaatctataccaaaagttggaaaacgaccccaggacaaggtcgctgctcagtgaccccacctacagggagctcatagaacagctgcagaacaagccgtcagacctgggcacgaaactacaggatc

SEQ ID NO: 147 - DNA, 475 bp, Homo sapiens
  misc_feature (1)...(475): n = A,T,C or G
tctggggaaagcaaggactcaggctcccctacccacaggtcagcttctaggaaaaatgctagggccgagagcctggagcacaccgagaagccggaacctgcggncgtcgcctctgtctccggaaaggggaagaaaggcaaggnaaaangtgcnacggtccctgtctgcctcagcctncagaagngggagccccnaaanatcagggtggnccacattttcaacangtcacacacagcctgaggcctgnnctaataccacattccccgaatacccccatcctnccaaggccattgctacctgctctncaagcccctcccacaaggccattgctacctgctctccaagcccctcccataaggccattgctacctgctctccaagctcctcccaagtgnctggacttaccctcctgtcagaagacagtgagtgatagcaagcatcagactgctcaccaagtgtttttaaatatacaagc

SEQ ID NO: 148 - DNA, 475 bp, Homo sapiens
  misc_feature (1)...(475): n = A,T,C or G
aatacggatggaccccacncataactgcatgcctgatggacatantnaatgccaaggnccatgcactcattaactggtagcctttncagccntccttctaacatcagggntagtaatatgatttcactataattcagtnacnntattaaccctnggnctactgaccaatatcctcacaatatatnaatgnngacgagacntaattcgtganggaacctaccaaggccaccacactnctattgtacaaaaaggactacgatatgggataattcnattcatcgnctcggaagtatttttntttgcaggattnttctgagcgttctattattntagcctngnaccaacacatgatactangaggctgcngacctncaacnngaatttnaccacttaaccctctanaagncccactacttantacttnagtactnctagnatcacngtgttttgaatttcntngagctcatcatttggc

SEQ ID NO: 149 - DNA, 472 bp, Homo sapiens
  misc_feature (1)...(472): n = A,T,C or G
catattcgagcacctgctggccctgttggngtnctncgtactgnnggcactgcnagtggatggcttgactccggtgcctctcctggtgnnaacgtctttgtgccctttttngccgncnacgggctcagtacctacttcaccaccatcgttnncgttcgactcttncaagatggggagaagcgactggctgtgctgcgcctcttctgggttctcaccgtccttagcctcaagtttgtctttgagatgttgctgtgccagaagctagtggagcagactcgagagctctggttcggcctgatcacgtctccggtcttnattctcctgcagctgctcatgatccggacttgtcgcgtcaactagcctcttgcagtggctggaaatggagcactgcgcagctggagttctggacctcccggtcctgacccaacttggtgccacacttggtgganctttggatcaaaaattagagggt

SEQ ID NO: 150 - DNA, 471 bp, Homo sapiens
  misc_feature (1)...(471): n = A,T,C or G
aagctttctcactatttgacaagggacggggnatgggtacaataacaacaaaggnagctggggacagtgatgaggtccctggggcagaaccccacagaagcagaactgcaggacatgatcaatgaagtagatgcggatggtaatggcacaattgatttccctgaatttctgacaatgatggcaagaaaaatgaaagacacagacagtgaagaagagattagagaagcattccgtgtgtttgataaggatggcaatggctatattagtgcagcanagcttcgccatgtgatgacaaaccttggcgagaagttaacagatgaagaggtcgatgagatgatcagggaagcagacattgacggggacggtcaggtaaactacgaagagtttgtacaaatgatgacagcgaagtgaagacattgnacagaatgngttaaatttcttgtacaaaanngtttatttgccttttctttg

SEQ ID NO: 151 - DNA, 468 bp, Homo sapiens
catgccgtggctcagtcaacatgcccttcatggacttcctgacgaaagatggcttcgagaagagcccagaggagctgcgtgccatattccaggacaagaaggtggacctctcacagcccctcattgccacgtgccgcaagggggtcactgcctgtcacgttgccctggctgcctacctttgtggcaaacccgatgtggctgtttacgatggctcctggtcagagtggttccgcagggcacccccagagacccgtgtgtcccaggggaagagtgggaaggcctgagtgtgtgcagcctcctcctctgcccacccaatccagccagttcccttcagggaggttggtgtgacctgctgtaggttcaccttttaggctacggatattgacagggttttagaattgctcttggtgcctccctccctccctccctctacattggaataaagtgccttttctcagaaaaaaaaaa

SEQ ID NO: 152 - DNA, 467 bp, Homo sapiens
  misc_feature (1)...(467): n = A,T,C or G
agctccatctgggggccggcntctgtgtgggcctcagccctcctgctgctgtggctgcttctcctaatcgctggggatcagggacncacagggacaccaccgccacgggaaaaggggcttcncatgctgaactcagggtcaantacccgtncgngctgccctggcngagctagnggncctgncctgcttctttaccctgcaancacggctaagctccctgcgagacattcctcggatnangnggactaaggttcagactgcatnaggccagcgacaggatttgccaatcttggtggccaaagacaacgtggtgcgtgtggccaagggctggcagggacgggtgtcattgcctgcttatccccggcacagagccaatgctacccttctgctggggccacttcgagcaagcgactctgggctgnatcgctgccaagnggnaaagggtatcgaagatgagcaggacctgg

SEQ ID NO: 153 - DNA, 462 bp, Homo sapiens
agcacctccaaccatctgtggctcctgtctgatatcctaggccagggggccactgcaaatgtcttccgaggaaggcataagaaaactggtgatctctatgctgtcaaagtatttaataacataagcttccttcgcccagtggatgttcaaatgagagaatttgaagtgttaaaaaaactcaatcacaaaaacattgtcaagttatttgctattgaagaggagacaacaacaagacataaagtgcttattatggagttttgtccctgtgggagtttatacactgttctagaggagccgtccaatgcgtatggacttccagaatcagaatttctcattgtcttacgagatgtgggtatgtttatgtgattttatatatgtgtttgcttatatgggttcacacgtacgtgtattatttaaagatacagaatgaaaaaataatttcctacattcaaaacaaaaaaa

SEQ ID NO: 154 - DNA, 453 bp, Homo sapiens
  misc_feature (1)...(453): n = A,T,C or G
cagtttatgatgcttcacacaatctagtgagnaaaactgcagnncnttgnctttctcaaaatgactggtaagntagnatgncagcaacagtatnatttttttcaaaanccagaactttatatacgggagagtgtnaaaggancgtgtggacaggaaagaagttngcagcaactgtacactanctacnaggaccctcaggatgaaaananantnggaatagatggnatacagcagttctgtgatgatctggccctcgatccagccagcatcagtgtgatgntcattgcntggaagntcagggcggccacactgtgcgagttctccaaacaggagttcatggntggcatgacagagttaggatgtggctgcctagaaactctaagggcccngnnacccannatggancangantngnnagaaccaggacgatgtaaggatttttaccagtttact

SEQ ID NO: 155 - DNA, 446 bp, Homo sapiens
  misc_feature (1)...(446): n = A,T,C or G
aactcaagacttgttattccaacttccctttggttcacacaccagaacgttcctccaggaagtggccagagcctgtccaggtaggtancatccagagtttcctggaaaggctgtgttggctgagagcactgctgtactctcttggtagtgacagttgactttccaaccccattggggtcatacaactcagtttccgcaccatctcangggnggtggcatggagtcacagtgcctgggctgccagctagctacacgtttgctttncctttttgagaangagggtttcgctccctattnctganncttnnnctcagcttcctcccgagggcttggcctncaacttggggaccaacctggccgncnttgggttttngnttcgggtacaaaaacctgaatgttaactggggcttgggactttgaganttcgggggcttcctccaagttaa

SEQ ID NO: 156 - DNA, 443 bp, Homo sapiens
  misc_feature (1)...(443): n = A,T,C or G
caattttgaaggatcatggnctttacagggaaatctgacgtttggatgggatgggccgtcctggaggctactcacggttctcangttgctgtgtctgnaagccnagcgctncacatcctggaaaaaggtgctccttggcgaagtcatcnccgatacaaacgagaagacaagcttgggcgtggcccagaaaatatgctctgacgtcatcgaggagacacacgctgtgctgcgcaaggtttctgacatgaaggaagggacagtgtcactgagaagccagctctccttggtggaagccttgaggatggaagagctnangattctccaggcttctgctgaaatcctgagtggcttgctagccccctttttcctgacctcccggggtcaccgnggttccctcctatggaggatgtaccngccggctgcgtntttactgaggttggaaa

SEQ ID NO: 157 - DNA, 440 bp, Homo sapiens
  misc_feature (1)...(440): n = A,T,C or G
tcctgctgctgcctttgctnttcgccgggttttatgagcttgtactgncgnttttnattnacagggtgngnaactgcnctttcgagtgangantnanccncactncntgtnttacccngtataatgattagaatgccttncctacaaaatttnccaaactnaacaccaaactggttctntggnatatnaaaaagaacggnatcgaggaaacagntgctaagtgcaggangctgggtgcccaggcccntccntttgtggnggactgcanccagcgggaagagatttacagcgctgcaaaaaaggtaanggaagaagttgnanatgttagcattntggtaaatatcgccggngttgtctacactgcanacttatttgctncccaggaccctcanattgaaaagactttananntantgngcttgcccacttttggaccacct

SEQ ID NO: 158 - DNA, 433 bp, Homo sapiens
  misc_feature (1)...(433): n = A,T,C or G
ctgtcagcgcttcagtggaacaaaaccatcttcgcattttggggctgctaggaacttggttcagaaggctcaattgggggatagccgactgagcccagaatgtggggcatctggtattgaccaccctctgcccggccctccatgctttggtggctgatgggctgaagccattccggaaggacctcatcactggacagcggaggagcagcccttggagtgtggtggaggcatctgtgaaaccaggttnctgcacacattcgatgggatctctgtacagccaggtcanccgactggcccctctgagtagcagccgcagccgcttccacgccttcatcctgggcctcctcaacaccaaacagntggaactgtggttttccagcctncaggangatgcaggcctactgtccctcttgtatctgcccaccggattctt

SEQ ID NO: 159 - DNA, 430 bp, Homo sapiens
  misc_feature (1)...(430): n = A,T,C or G
gttaatactcctgatagagccntaccggaactccctnatgatcacntnntcgntccttttggtccatntctccgcgctggaaaacaaagaggtagaagcatttggcncatggctcccaacacagacagacacacagagacacatagcnatnaaaactcaccatggcagaaacagtgaaatctcgggcatgcatcttcttggtgagccagnccaccttncttctggngttgataaagatgactgcctgggtgatggtcagcgtctcatacaagtcacacaaatggggtnaagcttccactcctggaagattcagaaagtcaggggttacacttcaacaaactttactaccagggctgcctcctggactgggggcctcaacnncttggtccncattgatgnanaattgggggatncctccaggggcaatttt

SEQ ID NO: 160 - DNA, 423 bp, Homo sapiens
  misc_feature (1)...(423): n = A,T,C or G
tgacactaagtttatccngtgatgcgggctnnnggtgatttaattnttaactgttntnctagctatatagtgaaaaagactnanatcttgntntgnagaaccnggantanntaanattctgnctgtggataatcccgtttgctttcttcgtgtcactttcggctggggagaatgtcctgccctccaccatgcagccaggcgatgacgtggtctccaattacttcaccaaaggcaagcgaggcaagcgcttaggcatcctggttgtcttctccttcatcaaagaggccatcctacccagncggcagaagatatactgaccctttggggagggcatgtggggggcaagaccaagagagccaggcccctgggactctgggctaatcgtgcctgggagcctgggaaggagncttctgccagcccagg

SEQ ID NO: 161 - DNA, 423 bp, Homo sapiens
  misc_feature (1)...(423): n = A,T,C or G
ccccccaacatgaacccagtanaaccatgtccctttgaccagcctcacccccagggtctgctgcagtgccagtcccaggcaacatgctgtgtccagccctgaacccatgctttgctcagatgtgactatggtagtaggacagctgcctaactcagcctgtgggaggtttcccccaaggcacctgggtcagngaagacatgtaccctcccctgatgcctacccactgaacaggacctcaccaagctttttctgggagaaccaaggggaggcaggaggggtncttaagaaagccagccccttcctngaaccattttccttatggggaaatcagggnatctanntgtccncctggaccnaagggaccaancccnanctngggggatcccanctgggaaaanccccaaaaaaaaaggcctttttttg

SEQ ID NO: 162 - DNA, 422 bp, Homo sapiens
  misc_feature (1)...(422): n = A,T,C or G
atggcgtccatggactggcctggcaccccacactgngcacaagtcacccattctatgatgtggccagacacngnatnctgcaggtggcaganggcttttggagnggccatactgtgactcantaacttcaanatgagggattggtngccttcngctatggnccncaggtggnaatggaacccagtggnccaggcaagaggacccagtttggaaaanacgntgttttctgctgttgcgcccanaatccctgcagacaggggangngactgtgtgttgggttagagcacanatctntnnactaagcanaggcctggccacagtnnctanngagagggagatgaatggatgctgnatctacaagcagattgttctggnatcttaaacactatncgggctctggagctccgaagaggaaaaaaaaa

SEQ ID NO: 163 - DNA, 421 bp, Homo sapiens
  misc_feature (1)...(421): n = A,T,C or G
tcctcttcctacgctgccgaacgaagcaacaggcagctctccaatgnaataccctgcatcctccctcctttagtcgctccaactctcaagcctcagtagacagcagcgcatccatggtaggagttcctgcgggaaattgagagtatcaaagagagcagcgtgggggcgtcgcaggagcagccacccactgctgctgctgctgctgctgaagtcaagccagtggatgaaggagagcttgaagcggagtggctacaagatgtgggattgtcaactctgatctctggcaacgaagaggaagacggtaaagcgctcctgtctacattgactcggacccaagctgctgcagtgaaaaagagatacaacacatatactcagactctgaggaaaaagaataaacaacccgtcagggatgtcagagaca

SEQ ID NO: 164 - DNA, 420 bp, Homo sapiens
  misc_feature (1)...(420): n = A,T,C or G
accagtggtcctgcgcctgctgnanttaggnattctgcctggtggtggggatcctgacatcaaggnatgggacaccccggcaggaggttcctggggcctggcccccaacaatatgaagagcctttgctgaggccatgaggggttaccatggcgaccgaggcagccatccccgcccagcccgctttgctgaccaacagcatatggacgtgggcccagctgccagggccccgtacctgctgggctccagggaggccttctccaccgagccccgcttntgtgctccgagagctggcctgggacacctttctccagaaggacccctgagcctgagtgagggtccatcatcagtaggccctgagggaggcccagggggggtgggggctgggggaggcagnannaccttncccaggatgtaccccg

SEQ ID NO: 165 - DNA, 414 bp, Homo sapiens
  misc_feature (1)...(414): n = A,T,C or G
gtccagtgccagctgnggcggngccgctacccccacaagcctgactgagtgctttgcaggccaggnatgggaagcaaggccacactcggnaggcacaggtccccgagcatncttctcttacagaatcaactccaccacccatcctggggcagacctgaaggagaacttntgncgnaatccanacagcancaccacgggaccctggngctacaccanagancctactgtgngcanagaggaatgcagtgtcnctgtctgtgntgagctggggccaggaagcaggtnatggccatggccanaggggnacntnagaaggctngtnantattgagtggncatcanaatgctggcnncctttnanaacaanaggaaggagnttcaaactgaaggngcanttaggccaaggacatttgcg

SEQ ID NO: 166 - DNA, 411 bp, Homo sapiens
  misc_feature (1)...(411): n = A,T,C or G
gtgcgagaaggaagccngtggctgccctccctccncatgtgtccntgccatgatcaggtgnctatcagatgacgtcanaaccaagttgcgttccggtttagccataagctccttgggccagtgtgttgaagaacttacccttaacagtattgatgctgaagcaacatgtgtggccatcagagtgaatatggaaaccttccaagttcaagtgatagacaatggacttgggatggcgggggacgatgtagagaaggtgggaaaccggtattttactagtaaatgccactcagtgcgggacttggagaacccagcattttatggcttccgaggagaggccttggcaagtatagccgacatggctggtgctgtggagatttcatccaagaaaaacacaacactgaaaaaaaaaaa

SEQ ID NO: 167 - DNA, 410 bp, Homo sapiens
  misc_feature (1)...(410): n = A,T,C or G
gctctatgcccagggtactatgtggctgggctgctccagcctggcggacagcatgccttcgctgcgatgcctgtataacccagggactggcgcactcacagctttccagagngggnnagctgtcgatannggntccattntgaagcactccagnaggacttncangatggactctangctcntgctggtcttccttagaggtgagcgaggacntgcttcatgctttcagnagangctgtagaagaagcgantggnnctttgtagnagganngtgaaagagcanaacttgntgcccaaagnttatgggatnanggtgngatgcttgagagtgtcttgncnagangtgttgtgctatctacgntanggtattngaaantntgcgtgttagcgtttaataccttacatggaat

SEQ ID NO: 168 - DNA, 399 bp, Homo sapiens
  misc_feature (1)...(399): n = A,T,C or G
aggcaacatggtaaggnanctgcaaaccagttgcagccactgagtgagactcaagtagttaactcagnagggcggctgtgtatggcaggtcaccgacatgaaccggctgcgccgcttcttgtgttttggctctgaaggtggcacgtactatatcaaagaacagaagctgggccttgagaatgctgaagccttaattagactgattgaagacggcagaggatgtgaagtgatccaggaaatcaagtcctttagtcaggaaggcaggactgccaaacaagagccactgctgtttgcactggccgtttgttcccagtgtgcggacataaacacaaagcaagcancctttaaagnnnaanntgaagngtgtggcattncgaccccctcttgacttttatccag

SEQ ID NO: 169 - DNA, 398 bp, Homo sapiens
  misc_feature (1)...(398): n = A,T,C or G
gcaacgctgttgcggtggtacttaaaggagntcaaagaccctttgatgcaggagcccccaggtgtggttcaagnccttcctgctctgngagcttgtgttccagctgcctttctttcccattgcggcatatgccttcttcaaaggaagctgccggtggatccgaatccctgcaatcatctatgcagctcacaccataacgactttaattccaatcctctacacactcctgtttgaggatttctctaaagccgttgctttcaagggacaaagacccgagagtttccgtgaacgactgaccctcgtaggtgtctacgccccctatttaataatccccctcatactcctcctgttcatgcttcggaacccgtactacaagtatgaggagaaaagaaagaaaa

SEQ ID NO: 170 - DNA, 390 bp, Homo sapiens
  misc_feature (1)...(390): n = A,T,C or G
agaaaaagcttccgaagcaacaagtggcaaggacccccgccaccttgcgccctgcgtggncacccgcgacagctgcaagtccacccgcacccgcctgctgcgacccgtgcgcctcctgccagtgccgtttcttcggcagcgcctgcacctgtcnagtactcaaccccaactgctgacgcagcttcttcgctgcgcgcgcagcttcgggaacgggtgattgggcggggcttcagggtcccgcgcttttaggctgaggggcgggtctntgtgggtggggcttgtgggtgggcgtggtcagtggttgtgacttgtgggcgctttnaaaaaaccggttttctaggaaacctagtggaagctaaaatcagaatacaataatatttttaggctgcc

SEQ ID NO: 171 - DNA, 379 bp, Homo sapiens
  misc_feature (1)...(379): n = A,T,C or G
tgagatggaatccgtgaaaagggtgtggaccgaggctgggggaggggcaggagaagctgcaccagatgtggctcagctggaaccagaagaccccacaggatgctgaaaaggacccagctaagccagagcaggtggaggcccgggcactcagcatgttcagggacatcacccagcagctgcagagcatgtgtgtggccctgggggccagcatccagggcttgcccagccacgtcagggagcaggcacagcaggccccgcagccaggtgaacgacctttagggccacctttttccggcatttcacttcttttccagggaccttnttnagccgggnggtttttggcccaaaacttcggggaagccgccattaaacccagaaa

SEQ ID NO: 172 - DNA, 378 bp, Homo sapiens
ataagctgggggaagaaggctgcgtacacctcccaggatgttgattcagactgcgcaccaggaaagggggaaacgtcctcacccccgaggcacttgacttgcacctccaggcggcgctcactgccagtaaagtccaagtatcactctatgggaaatcctgggatttgaacaagatctgctacaaatcaggggttccccttattgaaaatgggatgatcgagcggatgattgagaagctgtttccctctgttcccctccctacctcctaccatataaattatttatatgaagatgtttatttttgtatatagatgctatcactgctcaaagttctatttttaaagagtgaaatatattctatacaaactcaaaaaaaaa

SEQ ID NO: 173 - DNA, 378 bp, Homo sapiens
  misc_feature (1)...(378): n = A,T,C or G
agtaacagtgctcacaccaaccactgcatcgncaangatgctgcaccggctggcccatggcctggggatggaagccctgctnttccagctgaccctgttctgcctcttcaatacggctgnttagtgacccagctgntgcggnctacaaagagntagcgnctttngccaaanacatcnttggcaagntctttgctttggctgcctntgaaccagcacngcgtantgnggagctgctattctggaagaacaccgcagtggttcgggaaatgacccagggatatggntccctggacagtgggtcttncagccacagagntnctatgtngagccctgaggaaaaggcccanctttaggaactatacctggcccacaaggatg

SEQ ID NO: 174 - DNA, 373 bp, Homo sapiens
  misc_feature (1)...(373): n = A,T,C or G
acctgagggtaggtacanncgacgatggagacactgctgtncgtcattgtggagaaggtatcattacatggaacggtttcttccatcaggtagaggagattcnaagcagcactagccaggattgcatcaanatntanctcaggngangannaacacactcntttcatnntgnntncnccacactcntatngaagcctgnaannccagcaaggatcacacattcaaggncagcgtgggctacagagaanattcacgggncagcctgagcaactgatgagaccctgtctaagaactgaaaactatagagagagctgggggtacagctcagtggtgaagtgntcacccagtatgantaagggccagcactagggga

SEQ ID NO: 175 - DNA, 371 bp, Homo sapiens
  misc_feature (1)...(371): n = A,T,C or G
tgaggactgccccgtttttcttgnaaaagccgcgcctgnctgggtctgtgnggactncaataccccancangcattgcagacagacacnnggaggaactacggatgccgaggaggcgctgctgggcctttcggagtagccggtaccgggcacttcaggcagatccgggacatcatgcaggcgttgcttgtcaggcccttggggaaggagcatacggtntttttggttgctgcgggttatgcagtgtctgtcgcgcattgaanaaggagaaaatttagactgttcctttgatatggnggctgagctcacacccttggaatcagctatcaatgtgctggagatgattaaaacagagttcacactgacaaaaaa

SEQ ID NO: 176 - DNA, 358 bp, Homo sapiens
  misc_feature (1)...(358): n = A,T,C or G
gtcttgggaaacagattctggagtctattgaaagcatacattctgtgggannccttcacagagacatcaaaccgtcaaacttcgccatgggacgtttccccagtacgtgtaggaaatgtttcatgcttgattttggcttggctcgacaatttactaattcctgtggtgacgtcagaccacctcgtgctgtgncaggctttcgagggacagttcgttatgcatcaatcaatgctcatcggancagggnatgggtnnganctngggacnttgnaactgcgtgctcntgactngcntnagagcnatatcttcatantncaggganaggcataatggngcgnttaggagctgagggaccctt

SEQ ID NO: 177 - DNA, 348 bp, Homo sapiens
  misc_feature (1)...(348): n = A,T,C or G
gcggcagcaaattcgtncgggnaccgccgccgccgtnccggttcctccgggaagtgaggcggcggccggggcagctgcgccggcttctcagcatccggcaaccggcaccggcgccgtccagaccgaggccatgaagcagattctcggcgtaatcgacaagaaacttcggaacctggnagaagaaaaagngtnnaatagnggnnntntnantaaaacttncnanantttatttganantgtgaanatacatgaacaagatatnaaactttanctattttgataagaaattttaatgtattaaattattaaatagngaaaagaggaaatattaaaatagtgaaagcactg

SEQ ID NO: 178 - DNA, 347 bp, Homo sapiens
  misc_feature (1)...(347): n = A,T,C or G
acctgagttttggtaaaacagtcacctatactgnganaannggaggctgagccncntcacaanagacacatttcnaggatgctgacagaaagaggagggagagagtancctaggtggcttcccaaaggaggcgtcctgnagcattggttcnggaanagctgaagagcctancacatggcagacgacacaccgaggcaacgagagtccatttccctcacacctgtggcccatggcctgnagaacatgggggccganttcctggaaataatgnanganggccagctcccacacaggcactcaagcctgccanagggtggaggcngnaggagcaaagcagtgtggaaacc

SEQ ID NO: 179 - DNA, 342 bp, Homo sapiens
  misc_feature (1)...(342): n = A,T,C or G
ctgtcatcagctcgcagcactggagccgcctcacgtangtagagtgacaggaagctgttgtaagcgtcgcagcactgnagccgcctcctcaggtatcctggctctggnaacttgctatgggagattggatgactgtgacagatccagttctgtgtacagaaaacaaaaatctctctcaatatacctcagaaacaaagatgtctccgtccagtttgtactcccagcaagttctgtgctcttcagtacctttatccaaaaacgtgcatggtgttttcggtgtcttctgcacaggagagaacattgaacaaagtatttcctatcttgatcaggagctggccacct

SEQ ID NO: 180 - DNA, 338 bp, Homo sapiens
  misc_feature (1)...(338): n = A,T,C or G
acctgaggctcgcgacanggtgtctaaggacctggtggctttgaagatggtgaagatggagcctgatgatgacgncnccacccttcagaaggagattctcatgctgaaaacttgncggcacgccaacatcgtggcttaccatggcagntacctctggctgcanaagctgtggatctgcatggaattctgtggagctggttctctccaggacatctaccangtgantggctnctctgtccacagctccacatcanctatnatgtgccgggaagtgcttcagggactggcctacctgnnttcngagaagaagatacctcgagacatcatagggagccaac

SEQ ID NO: 181 - DNA, 334 bp, Homo sapiens
  misc_feature (1)...(334): n = A,T,C or G
catgaatattgcattaacccataaggactangggatataatcncacngcacaggagggggtgcacngaanantcnganngcagnaacnnacncaatnttgggngantttncngtggtaatntacgcccaancgactacntgtctctaaatntttncctngcgnttccgagaccctgacctccggnagatgtttgggcagtttggcaaaatcctagatgnggaaataatctttaatgagcgcggctccaaggggnttgggggttcgttaactttnnagaatagtgctgatgcanacagggccagggagaaattgcccgggcaccgtggtagaggg

SEQ ID NO: 182 - DNA, 332 bp, Homo sapiens
  misc_feature (1)...(332): n = A,T,C or G
ctattatatggtgcttgcancacatctcctggctattcganggaagcantatntggnnagacacttaactcaagacaggtcccgcgngtctncctncanctccggaggacccggcgaccgaaagaagaggacacnatgtgcaggcnctggagacccacctcggaagaancccacccggntggncattgntgttgaaggagggtttgacctcaccgaggacangtttgaatttgacgaggatgtgangattgtcattnaaacncantatctgccnancnctagngctcccaaggnctgagctttctaanattagtacacatgggtccagctgt

SEQ ID NO: 183 - DNA, 324 bp, Homo sapiens
  misc_feature (1)...(324): n = A,T,C or G
ataccgtttccccaaagccagnanccttacctgtanctaccgctggnagaagnaggcggtgcttacagncggggagcatgaaggtcgactacgnatacccatcccganaggngcctcccccacggtgnatcacggtccanaagccatgnancgnataccctaccancgggggtaccgggaaacaccgtgacagtgatacntatcggtgtgaagagcggagcccangnnntggagaggactgctatgggtcttnacgttntcgacatcggaaacgggcacngagagagggcgccttaccgnacccgcaagcatgcccaccactgt

SEQ ID NO: 184 - DNA, 322 bp, Homo sapiens
  misc_feature (1)...(322): n = A,T,C or G
tttctgagattgacgcgcttttngaaaagnctgtcccggtgtcggnaaggnacctggtngccgtgaccttcccagctttacagggcagnagccttcantacctgaggacaggaggtctctggagaangagaacacaccctcatgaaccaagcctncagtatgagaaagagctaaagctgcttncacatgagaacccgaaaaacaccctccttttgggggggcatttttttttntntttcgccctgntttttggcttactggactttggganaaaaccccctttccanccncttaaaannangggggaagggctttctttttg

SEQ ID NO: 185 - DNA, 321 bp, Homo sapiens
  misc_feature (1)...(321): n = A,T,C or G
ttacctttagggatttgaatggggaaggncttgaaagancnacatgagcaagaaagcgtgtganagggagatgcagcgaatcaccttgcccctgtctgccttcacaaaccccacctgtgagaccgtggatgaaaacaccatcattgtgcacagcaaccagactcctgctgacgtgcaggagggcagcaccctcctcacgggccaggctggcacccctggggcctgagccccttcagtgggcaggtgcccatgtaaacactggtacaggacaggccaccctcctgcagttgggaggagctacattttgtgttgtggttaaaa

SEQ ID NO: 186 - DNA, 312 bp, Homo sapiens
  misc_feature (1)...(312): n = A,T,C or G
ctgaggacttacctcttcnaattcctggtgattggcagtgctggaactggcaaattatgtcttctccccagtttattgagaataagttcaaacaggactccaaccacactatcggcgtggagtttggatccagggtggtcaacgttggggggaagactgtgaaactacagatttggnacactgctggccaggagcggtttcngtcggngacgcgganttattaccgaggggcanntggagccctgctggtgtatgacatcaccagccgggaaganatacaaccttacttcgctgnttgggctaacttgattg

SEQ ID NO: 187 - DNA, 295 bp, Homo sapiens
acacccctcctccgctcgtgcccccggcggcccgcgagtggaacctgccccccaatgcgcccgcatgcatggaacgtcaattggaggctgcacggtaccggtctgatggttcccttctgctcggggtctccagcctgagtggtcgctgctgggtaggttctctgtggtttttcaaggatcctagtgcggcccccaacgaaggtttctgctctgctggcgtccagaccgaggctggagtagctgacctcacttgggtgggggacaaaggtatcctagtggcttctgattcaggtga

SEQ ID NO: 188 - DNA, 287 bp, Homo sapiens
cggttccacttggcagtcagtcgaatccattcaaggtcgcttagtccaacttaatgaagcctgtgtccttcgtgtactgccggaagcactggcggcacacgttcagccggtatttgcggatcaaaccgtgacggttggagcagacacggcaagagcgggaaccctggccgaacttccgtgggtgactccagtagagctgctggtcacccatcttgccttcagacacccaacgaggagaaaggtctaattaatttttaaataaataccattttatatgaaaaaaaaaa

SEQ ID NO: 189 - DNA, 272 bp, Homo sapiens
  misc_feature (1)...(272): n = A,T,C or G
gctggctaccatgaaacaacnatcccgnntgtgccgaaggctcctgtagttcanatcccagcanccacatggtgactnncaacgtacccgnaatgagatgggacgccttcttctggngtgtctggagcgagcangnactgagtgancacagtngaccggaataantnnaggtcctaaaattcaattcccaacaaccacatgaaggctcacaaccatctgtacagctacagngtactcacatacaataaataaataaatcttaaaaaaaaaaa

SEQ ID NO: 190 - DNA, 268 bp, Homo sapiens
ccctgcgcgggggaccaggaccgctgacaccacacccctgcaatgagttgggggcctctgcatcgcccagaacgcctgggcctgcccgccggggtagcggcaggcgacagccaagacctgactcccttatcttttaccgccaggcgaggactgtggaaacgggtaaagtggccacgtggcctctctagattctaaatgtgagcagcgatggacttggggtgagagatgaacgaactactgaataaagctaaaatgttatttaattaaa

SEQ ID NO: 191 - DNA, 260 bp, Homo sapiens
  misc_feature (1)...(260): n = A,T,C or G
aggacctttccggcacctggnggctctttcagcctgaacctaccaccgnctcaagtatcttctactagtacagcgaaagnagtaggcacaatccccagtcnccccttcaggaatccagcgccaccttgaagcgtggtggaaagaagtgtgctgtaccccactccagccccaatctagcggaggtaaagaagaaaggcaaaatgaagaagctgagccaaccagctgaagaggacctagttgtggggcttgaaaaaaaaaaa

SEQ ID NO: 192 - DNA, 252 bp, Homo sapiens
  misc_feature (1)...(252): n = A,T,C or G
tctcaccttcacggagctacagtgttccttacgatgccacgccttcctgcgcaggaacagcggctgctgacccaagctgtgtgcttggccatggcgagggtgggagcagcagctcggggcctccggtccacttcccatgtcacagcctcctctgcctccagcccatccaactagagctggntagcatgaagggagacagcggttcccaactggagtacagaggtaagggccaataaagaggacaggaggggg

SEQ ID NO: 193 - DNA, 250 bp, Homo sapiens
  misc_feature (1)...(250): n = A,T,C or G
agcatcaatggttcaagccaggaagtagcatctgagaaagacttgtgtcctcccctccttcaaaggcttatgggtgaacggacataagactgctgcatcgggactcaccaaaaagtaggcnnccacntacctctgaaactgtgcgatctcctggctaatgtcatccagctctttaacaccagtgaactctcctgatgccagagtacttgaactgtcctagaattaaaacttgaaatgtcaaaaaaaaaaa

SEQ ID NO: 194 - DNA, 234 bp, Homo sapiens
  misc_feature (1)...(234): n = A,T,C or G
agagcaccgacagcctaatgtnagtgctggcagtgaggctcaggaggtganccctcntcctgctgggaacagaagcnnagaggtgccngttaaagantaanccnngntttgaactttctggggcacttcttgaggacaccantaccttccggggtgnggttattaaatacagngagcccccagaagccnaggatccccantaaancngnggcgcctntacccctttaaaaatga

SEQ ID NO: 195 - DNA, 225 bp, Homo sapiens
acctgaggttttaaaatggaacatttcgatggcgtaactcagtacctattatgtgtgtgtcttctccctaggtacccgtctgcaggtgtctttacatatctcaatacaaaaattataacatttgatagtgtgctgtcaaagtgtgcttagctcatctggatatacccacactgttaaataatgtctaaacattaatcattaaaacctttttgattaaaaaaaaaa

SEQ ID NO: 196 - DNA, 222 bp, Homo sapiens
  misc_feature (1)...(222): n = A,T,C or G
tgagcctgtgaactcctggccttgataagtccctgacgccgatnccctggtcctggctgaggacgggaccatagtggatgacgatgactacttcctctgccttccttccaatacaaagtttgtggcgttggcctgcaatgagaagtggacttataatgattccgatggangnacngcttnggtttcccaagagnccttnnaggcagatgagccagacagccc

SEQ ID NO: 197 - DNA, 222 bp, Homo sapiens
  misc_feature (1)...(222): n = A,T,C or G
acctggagggatggagttttcttggaacgttcgtaaaaggaaaaggttctaggaggatggcagcaagtatgcttcggcgaaggcaaagnagtctgaagttttttatgagcttgctcatcagttgccacttccccacaatncacagcaaactgaagatcaacaacttgaagatgttccattatataatgatgtaatgnttccctcttctaatgaaaaattaaa

SEQ ID NO: 198 - DNA, 212 bp, Homo sapiens
  misc_feature (1)...(212): n = A,T,C or G
aacaggcgtcacatcattgataacagggtacattgttgcttctacttcatttcaccttttggacatggactgaagcccttagatgttgcatttatgaaagcgatacacaataaggtgaatattgtgcctgtcattgcgaaagctgacactctcactctgaaggagcgtgagcgncttaagaaaaggattttggatgaaattgaagagcatag

SEQ ID NO: 199 - DNA, 210 bp, Homo sapiens
  misc_feature (1)...(210): n = A,T,C or G
aaaatccggagtcttcaatgtatcanagcttgtgagagtatccatgaacacccataacccagggtaactggagtcaacttcccaancggaagaaattcccagccaaccntactatgatgacatgaactntggtgtgaacctgcagaggtcgttgtcttctccaccgtgcagcaaaagacccaaanctatntctatggatgaaaatggggg

SEQ ID NO: 200 - DNA, 208 bp, Homo sapiens
  misc_feature (1)...(208): n = A,T,C or G
acttctccagcctcctggagctcacactgctggtcggaaactatatgaatgcgggctccaggaatgctggtgctttcggcttcaatatcagcttcctttgtangcttcgagacaccaagtctgcagatcagaagangactctgttgcatttcttggctgagttatgtgagaatgaccaccccgaagnnctcaggtttcctgatgagct

SEQ ID NO: 201 - DNA, 208 bp, Homo sapiens
taaatttaaaaatggcctccataaaactacattgcaaaaaatgggaaagaaacaaaatggaaagagtaaaaaagttgaagaggcagagcctgaagaatttgtggtagaaaaagtactggaccgtcgtgtagtgaatgggaaggtggagtatttcctgaagtggaaggggttcacagagtaagaaacctcagtgcttcaaaaaaaaaaa

SEQ ID NO: 202 - DNA, 204 bp, Homo sapiens
tgaggatgcatttctgagccccggttgtggttcccgatggccctcgcagcagcgagtccgtggaaggaagccctttccgtccttcccactcctcctcggcggtgttcgatgaagacaagccgatagccagcagcgggacttacaacttagacttcgacagcatcgagctggtggataacttccagagcttggagaaaaaaaaaa

SEQ ID NO: 203 - DNA, 189 bp, Homo sapiens
  misc_feature (1)...(189): n = A,T,C or G
aagtatgttgtccgtaaaangagcaangcagcagtannaaancatgcaaaaatgnaaggctgaagatggagagaactacgccattaagaagcaggcagcagatccctgcangtagtcccggatgatgatcccagattgccagcggtcggcntagcaggctgncatatactgatcttcagcagatattag

SEQ ID NO: 204 - DNA, 183 bp, Homo sapiens
  misc_feature (1)...(183): n = A,T,C or G
actgcctgcactgcagtgtccccagangnacacatggtaacagtgatgccgctggcagtatggagtaagtaccatcagcaagctcatgtttgacttccagagggagttcaacctcagatgacgactctggctgtgctttggaagagtacgcctgggtccccccagggctgaagcctgagcaga

SEQ ID NO: 205 - DNA, 180 bp, Homo sapiens
  misc_feature (1)...(180): n = A,T,C or G
gtgcacattgtaatactgggcagtaattttgaaaggattacagtatcatcccaggcgctaagcatggtaaatattcaagtgggatgtgtagactgttcaatgcaacaaggcaagnattgcagcatcctatgggaacgttatctctgtttttgaaccagtcagtttgccgaaaaaaaaaaa

SEQ ID NO: 206 - DNA, 178 bp, Homo sapiens
  misc_feature (1)...(178): n = A,T,C or G
actgaggagaagcggttngcagtgttngagatcctctttgccctcatgancatccctnatcctttacagctccaacagtgncaacgaggtcttccactacggctccctgcggggccgnacgcgtcggccagtcaactctnangaagnggagtttctccagcgcctacttccctatcct

SEQ ID NO: 207 - DNA, 170 bp, Homo sapiens
aaagaagcagcaacagtggaagagctgaaccccaaaggcatccctgagttctggttcaccatcttcagaaatgtggacatgcttagtgagctggtgcaggaatatgatgaaccgatcttgaaacatctgcaggatattaaagtgaagttttcagaccctaaaaaaaaaaa

SEQ ID NO: 208 - DNA, 161 bp, Homo sapiens
  misc_feature (1)...(161): n = A,T,C or G
tgtgtcttactccctncatacctactggacgctgctgtggtgtacagaggccctgcccttggctgncaccgccctcttccccatcatcctcttccctttgatgggtatcatggaagcctccaaggnctgntaaaaggactacaaggacaccaacatatggt

SEQ ID NO: 209 - DNA, 160 bp, Homo sapiens
  misc_feature (1)...(160): n = A,T,C or G
tgaggttgcaaggtgagaaganntcggcccagnggcgaacagtggagggtgcnttgaaggagcgacagaaaggcagttgatgangctgccgatgccctgctcaaagcaaaagaagagttagagaagatgaaaactataattgaagatgcaaaaaaaaaaa

SEQ ID NO: 210 - DNA, 153 bp, Homo sapiens
  misc_feature (1)...(153): n = A,T,C or G
catagcccatgtgctgaatcaaatagaacccttcctggttcaacgacgaatggctccagggcatcttacaggactcaagccccagctggaggttgaaggtnaggaaactggagaagatcttacaggagcttggtggaatactcgaagaatgtt

SEQ ID NO: 211 - DNA, 146 bp, Homo sapiens
  misc_feature (1)...(146): n = A,T,C or G
caagcctgcacttggaacgttagcangcaccngttggcccanatcccagaagaanagacgaggaaagangaggaaaggaaaaaataggannctgatcanaagaaggaagctgctgtttctgtacaagangagtctgatcttgaaaa

SEQ ID NO: 212 - DNA, 143 bp, Homo sapiens
  misc_feature (1)...(143): n = A,T,C or G
acgcatgaagtcagtaccacccgtcnncaccaactccagaatggacttgccattttncttacaaagnatgtacgtcaactgctgaaaaatggagacgccgtacctggaaaacaaaacgaagaaaaancctacataaataggac

SEQ ID NO: 213 - DNA, 138 bp, Homo sapiens
  misc_feature (1)...(138): n = A,T,C or G
ggcctgtgcagtgacatgttggacttctctagctgcctacatntgaagcgaactgttctgccntgttagggaaactgatgaccttagcaaagaatttgcccgaccctggaaaagcacaagattttgtaaaaaaaaaaa

SEQ ID NO: 214 - DNA, 135 bp, Homo sapiens
  misc_feature (1)...(135): n = A,T,C or G
tgaggtagaaaatgtttaccctcnacctggctgggttgaaatcgatcctgattctctctgggctcagtttgttgccgtaataaaagatgctgtcaaagctgcaggggtgcagatgaatcaaattgtcgaaaaaaa

SEQ ID NO: 215 - DNA, 135 bp, Homo sapiens
aataactataccgctcttcatctattaattacagccaggaatctggagcagcagctgatgatataaagccatgtccacgatgtgctgcttatataataaagatgaatgatgggagttgcaatcataaaaaaaaaa

SEQ ID NO: 216 - DNA, 132 bp, Homo sapiens
  misc_feature (1)...(132): n = A,T,C or G
aagcgattgccagctggaatggnaggtattaccttcagctccctgacgactacgagnactcgcgcttctgagcctgggaagaagagggtgagatgggcagacctagaagaaaagaaggatgcagataggaaa

SEQ ID NO: 217 - DNA, 126 bp, Homo sapiens
  misc_feature (1)...(126): n = A,T,C or G
gacttgggcaccacctactcgtgcgtgactcgtgttcnagcacggnaaggtggagatcatcgccaacgaccngggcaancgcacgacccctagctacgtggncttnaccgacaccgagcgcctcat

SEQ ID NO: 218 - DNA, 110 bp, Homo sapiens
  misc_feature (1)...(110): n = A,T,C or G
cagctgcagccaccgccgcgcagtnccacgctggctccgcgcgccatggtcacccacagcaagnttcccgccgccgggatgagccgccccctggacaccagcctgcgcct

SEQ ID NO: 219 - DNA, 107 bp, Homo sapiens
tctcccttggggacaccatcggtgtaggcaccccaggactcatgaaagacatgctgactgctgtcatgcatgaagtgcctgtgacagcattggctgtccactgccat

SEQ ID NO: 220 - DNA, 636 bp, Homo sapiens; identical to SEQ ID NO: 17
  misc_feature (1)...(636): n = A,T,C or G

SEQ ID NO: 221 - DNA, 615 bp, Homo sapiens
  misc_feature (1)...(615): n = A,T,C or G
gcgtctgcggccccgaanggcaggcactgccaccgggcgaatcgnggcagccatcggcgctgnggtggacgtccagttcgatgcagggattaccacccatcctaaatgccctggaagtgcaaggcagggtacagcagactggttttggaggtggcccagcatttgggggagagcacggtcagaactattgctatggatggcactgaaggcttggttagaggccanaaagtactggattcaggggcaccaatcaaaattcctgttggtcctgagaccttgggcagaatcatgaatgtcattggagaacctattgatgagagaggtcctatcaaaaccaaacaatttgctcctattcatgctgaggctcctgagttcatagagatgagtgttgagcaggagattctggtgactgggataaaggttgtggatctgctggccccatacgccaagggtgggaaaatcggactctttggaggtgctggcgttggaaagacagtactgatcatggagctaatcaacantgtcgccaaagcccatggtggttactctgtatttgctggtgttggtgagaggacccgtgaggncaatgatttntaccatgaaatgattgatcaa

SEQ ID NO: 222 - DNA, 606 bp, Homo sapiens
  misc_feature (1)...(606): n = A,T,C or G
gactgagactggagatttgatgcatcaccttggggtgggtggagaggaccacagtgaccatgatgaccacggtgatcatgctgaccacagtcatccggacaggaaagccagccaccaagactctgagctccatactccccacaacagcancatctagtgtatgggacacgctgtgcctgagtgccaaagatataatggctgtgtatgggctatctgaagaggctggggtgagccctcaggcctgggcccaactgacccctgccttggtccagcaacagctaagtggagcctgcagcccctaccccactatncgtattcaggaccagctcagnnaaacagagaggtatctctatggctcgctggccaccctgctcatctgcctctgtgctgtgttcggtcttctgctgctgacctgtgccaaatgcancacanccacccactacatcatgcagaccttcctaagcttggctgtgggcgcacttaccggcgatgctcttctgcacctgatacccaaggngctgggactgcacacacatggnggagagggtcacacccatgaagaggatgtggnccgttggtgggcangccaccctggcgcctgctggt

SEQ ID NO: 223 - DNA, 597 bp, Homo sapiens
  misc_feature (1)...(597): n = A,T,C or G
tgtcataaaaactttaaggagaagagaaacccacgcaaggtcaggtggactaaagccttccgggaaagcagctggcaagggagctcacggtggacaactcatttgaatttgaaaaacgtagaaatgaacctgtgaaataccagcgtgagctgnggaataaaactattgatgccatgaagagagttgaagagatcaaacagaagcgccnggccaaatttataatgaacaggttgaagaanaacaaagagctccagaaggngcaggacatcaaggaggtcaagcagaacatccatctcatccgggctcctctcgctggcaaaggaaagcagctggaggaaaaaatggtccaccagttacaggaggatgtggacatggaggaagcttcctaacggngctgcccgcaaccagccctgagcacgctggagtggagtggagactttcngcccctaagttattcattggttccataaggnccttcagacaanggggattcaatgtgctttccccttcaacgttgcagcctgtaaaagcatncccttgtgggnggttgggtctnagctcancactctgcttcctgntgttatgcgcacccacaca

SEQ ID NO: 224 - DNA, 588 bp, Homo sapiens
actgaggttgacaagagttccccgagatagaagccctgaaggagcgggcatcctcccagctaccccaggaatgtggtcgtgaggcagagcccgcagctttcagaagaagagtagtcttgggccatggcccaggtcagcatcaacagtgactacagcgagtgggcttccagcactgatgctggggagcggggcccgtttgctccaaagtccctgtgtggatgtggtacctaagagtgagggggaggcgtctcctggagatccagacagcggcaccacttcgacgcttggagccgtcttcatcgtcgtcaatgcctgcctcggtgcgggtctgctcaacttcccagcagccttcagcaccgctgggggcgtggcagctggcatcgccctgcagatggtgagtgagtgcgcgcgtgcgctggcatcggaggtaggcaggcaactccgggcctctgatttgcaggggaggctttgaatcagagatgagccataagggacatatgtcgtcatccttccctcccctataaatgactttatcagtctatcccagaacttcctgtgtagccatggatgacttttaacgttagatct

SEQ ID NO: 225 - DNA, 584 bp, Homo sapiens
  misc_feature (1)...(584): n = A,T,C or G
actgagatttggactgagcaacaaatttgaatcagaattcccttcttcattaactggaaaagtagctcctgaagaatttaaagccagcatcaacagagttaacagctgtctcaggaagaatcttcctgttaatgtgcgggtggttgcgtttgtggctgcctgtgcttgcntgcgtgcacgttagggtgcagtatgtggccagttatttgcctcagtaaaagaacacgaagatcgattgagaagttattagaatgggaaaacaataggttataccacaagctgtgcttgcactggagactgagcaaaaggaaatgtgaaacgaacaacatgatggaatatgtcatcctcatagaatttttaccaaagacaccgatttttcgaccagattagcatttgctttatttatagagactttccaagngngntgtctttccaatggtgccttgcttggtgctctcctgctggtgacatgatgctggttctacagaattgggnggngntcttgtttgntttgttttttaaataaccggatgttctatgtgtgcatatttgtcaaactttgcaaggtatttcatacagatgtt

SEQ ID NO: 226 - DNA, 579 bp, Homo sapiens
actgaggatggctgttcttctgatgaggttgatgctacaaactacaaagcttgaccataacttaattggaagatgtttgcaaagacacgctgtgaagccagatccagcacagctgtccctgtctgcgtccaccccaaagctgttgtacctgacttctgcaaaaggttttagtactgctggagacccacagggtgagaggaaacagaaaagaagggatgctttctctaacaccggccggaagattagtgagcggattatccgcgtcctggatgagaagggcatggacctggggatgatgcatcgagcagatgtgatcagactcatgaacaagcaggacctgaggctggtgcagaggaacaccagctcagagccaccggagtaccagcttatgaccggagagcagatccaccaggagcggctaaagctccgggaacaggaaaaggccaaacccaaaactggaccaactatgacgaaagagctcgttttctcttcaaatattggacagcacgatttagacaccaagagtaaacagatccagcagtggatagagaagaaataccacgttcaagtcacgataaa

SEQ ID NO: 227 - DNA, 578 bp, Homo sapiens
tgaggcgctggagatctggtaaaagtaccatcgtgaaacagatgaaaatcattcatgaggacggctattcagaggacgaatgtaaacagtataaagtagttgtctacagcaatactattcagtccatcattgcaatcatacgagccatgggacggttgaagattgattttggggaatctgccagagcagatgatgcccgacagttatttgttttagctgggagtgctgaagaaggagtcatgacttcagaactagcaggcgtgattaaacgtttatggcgagatggcggggtacaggcatgctttagcaggtccagggaatatcagctcaatgattctgcttcatactacctaaatgatttggatagaatatcccagaccaactacattccaactcagcaagatgttcttcggacaagagtgaagactacaggcattgtggagacccacttcaccttcaaggaactctacttcaaaatgtttgatgtaggtggccaaagatccgaacgaaaaaagtggattcactgttttgagggagtgacagcaattatcttttgtgtggctctcagtgattacgag

SEQ ID NO: 228 - DNA, 576 bp, Homo sapiens
  misc_feature (1)...(576): n = A,T,C or G
actgaggtaaccaggtctctctgcagccatgtcagccaaggcaatttcagagcagaccggcaaagaactcctgtacaagtacatctgcaccacctcggccatccagaaccggttcaagtacgcccgggtgactcccgacacagactgggcccatctgctgcaggaccacccgtggctgctcagccagagcttggttgtcaagccagaccagttaatcaaacgtcgaggaaagcttggcctngtcggggtcaatctctctctggatggagtcaaatcctggctaaaacctcgcctgggacatgaagccactgtcggcaaggccaaaggcttcctcaagaactttctcattgaacccttcgtcccccacagtcaggcggaggagttctacgtgtgcatctatgctacccgggaaggagactacgtcctgttccaccatgaagggggtgtggatgtgggcgatgtggatgccaaagcccagaagctgcttgtgggtgtggacgaaaagctgaataccgaggacattaagagacacctgttggtccatgcacctgaggacaagaaagaagtcctggccag

SEQ ID NO: 229 - DNA, 575 bp, Homo sapiens
  misc_feature (1)...(575): n = A,T,C or G
aacgggcaggcgccacgngcccaggcggcaaacnccgnaaccgctttgncaantaaggaacggccagtgaaacgtactacttcgccaacctgagcaacaantcccancgctacatggnagtacatcttcaccacctgcgtggacacgcgctggcgctatatgctcatgatcttctccgcggccttcctcgtttcctggctcttnttnggcctcctcttctggtgcattgccttcttccatggtgacctggaggccagtccctctgtgcccgcggcaggaggcccggggggcaatggcggggcaagcccgaatgcccccaaaccctgtatcatgcacgtaaacggctttttgggggccttcctcttctcagtggagacccagacgaccattggctacgggttccggtgtgtgacagaggagtgcccgttggcggncattgcggngggttgtccagtccattgtgggctgngtcattgactccttcatgattggcacgatnatggccaagatggnacggcccaaggaagcgggcacagaccctngntgttanancaccatgctgtcaatctccgttc

SEQ ID NO: 230 - DNA, 571 bp, Homo sapiens
  misc_feature (1)...(571): n = A,T,C or G
ctgaggtatcactcaaccaatctaaagcaaaagcacagcagggcaggccttcctgtgtgttaacacaggaaggctggcaccctggtcattctggagaccccagcactgaccggcttccggaagggcagcaagatctgtcgtcgcagcacatggaagaagttgccaggggtggaacagttgacaacaatccagttgcagtcatagagctgattgatgtcaaagttttcttcctgcaggtcctatngcatgggaggaaatgggcagaggccaatggcaccttgtgagcattgtgcctgggacaggaggcaacacgaggcagagaggtctcaggatgtctctcaggacactcaaggactcactgaggacagngagaacaggatccacagcttccctgagtctgagccccatttaatccgnggtggctcctgagggctaccgtttagcagnggatacatgggatctaggagacgtacagtcaagtctacatttccttagaaactgactcctgggttcttttaaagctgccttaacgcggctgggaaagatggnactgactgttcttccaaaggtc

SEQ ID NO: 231 - DNA, 570 bp, Homo sapiens; identical to SEQ ID NO: 18
  misc_feature (1)...(570): n = A,T,C or G

SEQ ID NO: 232 - DNA, 569 bp, Homo sapiens
  misc_feature (1)...(569): n = A,T,C or G
gaagctgcaaggtcacncatttctgaatcatnggagcaggaacantaaacnagagaaaatggtgttacagatgacctgggatgctcccaagcccaaaaaagctaaaatgagagaaaagctaaatggagacaccaangaaggacttagattttcagatgaattctccccatctcataagtcaagaanaaaagacctgccnaatggagatgtggatgagtatgagaaaaggtcaaagcgagtgtcatcctcagaaaactctcacaagtcangcgatnaagcagaggagactctaacacgtgaacaaaaggaaggagccttctctaatttctccatttctgaggagaccataaagcttctgaaaggtcgaggggtaacatatctctttcctattcaagttaaaacctttggtcctgtntatgaaggaaaagatttaattgctcaancccggacaggaacaggaaagacnttctcttttgccatacccttgattgaaaggctccaaagaaaacaagaaacanttctgtttgccgtcnccctnnggtacttcggtttggctccaacaagggaac

SEQ ID NO: 233 - DNA, 568 bp, Homo sapiens
  misc_feature (1)...(568): n = A,T,C or G
caagatgctcaactacancactcccagcgctgggggctgcctgctggacaggaaggcagngggcacccctgctggcgggggcttccctcgcaggcactcggncactctgcccagctccaagttccatcagaaccagcttctcagcagccttaagggtgagccggccccagtccctgagctcacgcngacagccgctttcgagaccgctctttctccgaagggggcgagcggctgctgcccacccagaagcagcctgggagcggccaggtcaactccagccgctacaagacggagctgtgccgtcccttcgaagaaaacggtgcctgtaagtacggggacaagtgccagttcgcgcatggcatccacgagctccgcagcctgacccgccaccccaagtacaagacggagctgtgccgcaccttccacaccatcggcttttgcccgtacgggccccgctgccacttcattcataacgccgaggagcgacgcgccctggcggggggccgagacctctccgctgaccgtccccgcctccagcatagctttagctttgctgggtttcccagtg

SEQ ID NO: 234 - DNA, 568 bp, Homo sapiens
  misc_feature (1)...(568): n = A,T,C or G
gactgaggtggggtctttactgggcnggngagtttncagtnggagactgcggccatcaccgtcgcccctcgctgtcccgctggcgggcccactcgatattgcctgtggacgatgatatcaacgggctaaacgaggagcataagcngcnttnnangtactatctctaagnttnttcaagagaacctggcccccaaggcccaagagatngatcnaaccaatgacttcaagaacctgagagagtntgtggaaacancctggggagcctggntgtactgggcatcacagccnccgttcagtatgggggntntggcctgggctacctagaacatgtgttggtaatggaagagatatcccagggcttngggagcaggggggctcagctacggtgctcactccaacctctgcgtaaaccagantgtncgaanngggaatgaggcncagaaagagaaataccttcccaagctcatcagtggtgagttcatcggagccttggccatgagtgaacccaatgctggctctgacgttgtctccatgaagctaaaagcagaaaagaaaggagatcactatg

SEQ ID NO: 235 - DNA, 567 bp, Homo sapiens
  misc_feature (1)...(567): n = A,T,C or G
actgagtaaatgtttattggaggcttgagctgggatacaagcaagaaagatctgactgaatatttgtctcgatttggggaagtggtngactgcacaattaaaacagacccagtcaccggnaagatcaagaggatttgnatttgngcttttcaaagatgctgcgtagtgtggataaggttttggaactgaaagaacacanactggatggcaaattgatagaccccaaaagggccaaagctttnnnggggaaagaaccccctaaaaaggtctttgtgggtggattgagcccagatacttcagaagaacaaattaaagaatattttggagcctttggagagntggnctgtattgancttcccatggatacaaaaaacaaatgaaagaagaggattctgttttatcacatacacagacgaagagccagtaaagaaactgttagaaagcagataccatcaaataggttctgggaagtgcgaaatcaaagttgcgcaacccaaagaggtgtacaggcagcagcagcaacaacagaaaggaggcagaggggctgcagccggcggaagaggaggt

SEQ ID NO: 236 - DNA, 567 bp, Homo sapiens
  misc_feature (1)...(567): n = A,T,C or G
gactgagagaagatcttctcagaagcaactcccaggtgtgagcagtgtcagagcgtggtaaagcctgatatcgtgtttttcggtgagaaccttccatcgcgcttcttctcctgcatgcagtcagacttctccaaggtggacctcctcatcatcatgggcacctccctgcaggtgcagcccttcgcctccctcatcagcaaggcaccactagccaccccacggntgctcattaacaaggaaaagacaggccanacggaccccttcctgggcatgatgatgggcctgggaggtggcatggattttgactccaagaaggcttacagggacgtggcctggctgggtgactgngatcaaggctgcctggctctcgctgacctcctcggatggaagaaggaactggaagaccttgtccggagggagcatgccaacatagatgcccagtcagggtcacaggcccccaaccccagcactaccatctcccctggaaagtccccaccgcctgccaaggaggcggccaggaccaaagagaaagaggaacagcagtaacagtaaccatgacctcccgca

SEQ ID NO: 237 - DNA, 565 bp, Homo sapiens
  misc_feature (1)...(565): n = A,T,C or G
actgagcttcggaaggagtatggggccaacgtggttcctgcattccccccaaagaagctgttctctttgacccctgcagaggtggagcagaggagagagcagttggagaagtacatgcaagctgttcggcaagacccattgcttgggagcagtgagacttttaatagctttctacgtcgggcccaacaggagacccaacaggtgcccacagaggaggtttccttggaagtgctgctcagcaatggacagaaagttctggtaactgtgctaacttctgaccagacagaagatgtcctggaggctgtggctgcaaagctggatcttccagatgacttgatcggatattttagtctcttccttgttcgagaaaaagaagatggagccttttcttttgtacggaagctgcaggagtttgaactgccttatgtatctgttaccagtcttcggagtcaagagtataagattgtgctcagaaagagttattgggactctgcctatgacgacgatgtcatggagaaccgggttggcctgaacctgctttatgctcanacggtgtcaggacatg

SEQ ID NO: 238 - DNA, 562 bp, Homo sapiens
  misc_feature (1)...(562): n = A,T,C or G
actgagccgctttgaatttatttggacgtgatgaaattgctacctatgagacagggaaagtgnatcatgaagagaccaaggggattcactattgcactcgcatcctggtaccgtgtcacctcgggtcagtgacagttgcatttgcaccaggccttggaaagatgacgtgcagagcccaaatgaaggcatcagcactgactagggttctgatgactctactccagaaaggtgcatgaagaggtctcctagctccatcacatccacatcatcagtgcttgggggcttgctgggtttctccgtttgccatctgcaaatacttgcccaagtcatgcgaaaacaggcactggctgccttcaccacttacaccatgcataaaatacctgtgggtgacctgcttggtgcccatggcagtgggtccacgggctggagtcgcactgaaatctcanagctgccagtgccctggcccagcctggccctgtccccaacaaatcattttcaaatgaatgtttagaactgaaggatgtaagaaatgaaaaaaagtaataaaagactcattctggac

SEQ ID NO: 239 - DNA, 562 bp, Homo sapiens
  misc_feature (1)...(562): n = A,T,C or G
actgagcggagcgactttnaacagctggctggntgttcgtcatattgaaaagtacgtaaaccaaggtaaaagtggaacaagagaattgctctggtcctgggcacagaaaaacaagacgatcggcgaccttttagaggttctccaggacatggggcatcaacgagctatccacttaatcatcaactatggagtaagctggactccttcagtgcagacgcatcacgagcttccattccccagcttcccacctgaggtgaagcatgcgtgcagagaaaacgaccctggacctctggaaccagccaatgtcacagtggataatgttcttgttcctgaacataatgaaaaaggaacactgcagaaaacccctatcagcttccagagtatcctagaaggaaccaaacatttccacaaagacttcctgattggagaaggggagatattcgaagtatacagagtggacattcgaaaccaagcatatgctgttaaattgtttaaacaggagaaaaaaatgcaactaaagaagcactggaagagatttttatcagaactggaagttctactc

SEQ ID NO: 240 - DNA, 560 bp, Homo sapiens
  misc_feature (1)...(560): n = A,T,C or G
tgaggggcaagatgaagaggattgcctttcagttcacgccttacagctgggtacgctttgagtggaagccagcctccagcctgcaccgctggctggccgtgtgtggcatcatcctggtgttcctgctggcagagctgaacaccttctacctgaagtttgtgctatggatgccccctgaacactacctggtccttctgaggctggtcttcttcgtgaacgtgggtggtgtggccatgcgtgagatctacgacttcatggatgaattgaagccccacaggaagctgggccagcaggcctggctggtggcagccatcacagtcacagagcttntcatcgnggngaagtatgacccgcacacactcaccctgtcactgcccttctacatctcccagtgctggactcttggctccatcctggtgcttacatggactgtctggcgcttcttcctgcgggacatcaccatgaggtacaaggagacccggcgacagaagcagcagagtcaccaggccagagccgtcaacaaccgggatgggcaccctgggccagatgatgacctgctt

SEQ ID NO: 241 - DNA, 556 bp, Homo sapiens
  misc_feature (1)...(556): n = A,T,C or G
actgaggtggtgtatgaggacagccgcatggttggcctgaaggccccctatgtgtcaggcttcctggccttccgagaggtccctttcctggtggagttggtacagcggctgcaagagaaggaaccagatctcatgccccaggtcgttcttgtggatggaaacggggtgcttcaccaacgaggcgttcggggtggcctgccaccttggtgtccttacagagctgccatgcatcggggtggccangaagctcctgcaggtggatggactggagaacaatgctctgcacaaggagaagattgtgctcctgcaggccggaggagacacatttcctctgataggcagctctgggactgtcctgggaatggccctgaggagccatgaccacagcaccaagcccctctatgtctctgtgggccacagaataagcctggaggtcgctgtgcgcctcacccaccactgctgtaggttccggatcccagaacctatacgccaggctgacatccgctctcgagagtacatccgaaggactctagggcagcttggggtggctcctgca

SEQ ID NO: 242 - DNA, 553 bp, Homo sapiens
  misc_feature (1)...(553): n = A,T,C or G
gactgaggttggaaaaaggcagacatgatcaataaaaatatgactcatcaggtacaagctgagagagatgccctggcactgagcaaaagcccttttgttgtgcatctctattactcactgcagtcagcangcaacatctacttgataatggagtatcttattggtggagatgtcaagtctntcctacatatatatgggtattttgatgaanagatggctataaaatatatttctgaagtagcattggctttagactacctgcncagacatggnatcatccatagggatnagaaaccggacaatatgcttatttccaangagggtnatattaaactgacagattttggnctttccaaagttactttgaatanagacatcaatatgatggatattctcacaacaccatcaatgtctaaacctaagcaagattattcaagaactccaggacaagtcttatctctcatcagttctttgggattgttcacaccagntggagaaaaagatcaagactctgcaaacatgtntncagcccctaagtctgctgcacaacttt

SEQ ID NO: 243 - DNA, 551 bp, Homo sapiens
  misc_feature (1)...(551): n = A,T,C or G
gaactgagcccccctaggcccagaggttggttcctgctgtgacatgcctgccatgtggccacttcttcatgtcctctggcttgctctggtctgtggctctgttcacaccaccctgtcaaagtcagatgccaaaaaagctgcctcaaagatgctgctggaaaagactcagttttcagataaacctgtccaagatcggggtctggtggtgacnggacatcaaagctgaggatgnggttcttgaacatcgtagctactgctcatcaagggctcgggagagaaactttgctggagaggtcctaggctacgtcactccatggaacagccatggctacgatgttgccaaggtctttgggagcaagttcacacagatctcaccagtctggttgcaactgaagagacgtggtcgtgagatgtttgaaattacaggcctccatgatgtggaccaagggtggatgcnagctgtcaagaagcatgccaaaggtgtgcgcatagtgcctcgacttctgtttgaagactggacttatgatgatttccgaaacgtcttagacagt

SEQ ID NO: 244 - DNA, 547 bp, Homo sapiens
  misc_feature (1)...(547): n = A,T,C or G
gactgaggtttagaaggatccagcccgaggctaaggtggtcacagaagggagagtcagccatctgcagctaggagatatgcttaaaggaaagactcagcagcaaggagctggggtgtgatggccggctcccacgtggacatggcgccagcttccaccaccgagggaactggggaaaagccagggcccactgcgccagcacccaccccagctgctcagtatgagtgtggggaatgccggcaagtccttcaggtggtcatctcggctcctgcaccatcagcgcactcacacaggngancgntcctataaatgctcggactgccnnaaancnnttangggnncctgaancttcctgtancaccagcggngccatacaggngancgnncctatnaangcccacactgncccanngcctttnagcgctntttcttgctgcagatccaccgcagtgctgcacacnngctctgtngnncttgacctgnnnncagagtggtctgnncttccagnggtcatcccattaccaataccacttgagacagcataccggt

SEQ ID NO: 245 - DNA, 545 bp, Homo sapiens
  misc_feature (1)...(545): n = A,T,C or G
gactgaggtgccaggagcagtacccaggctgctctggctccagtgaggatgaagcggccagtgaggcccggagcaccaccagtgactgtcccagccttctcagcaccaccacagaggactgcctgggtggcgaagcggtggacgaacagagccagcaggaaaacctggaggagaagctgaaaggttatgtggactgcctgactgacaagagtgccaagacccgtcaaggagccctggagagcctgcgcctggccctggcctcccgcctacttccggactttctgctggagcgcagcctcactctggcggatgccctggaaaagtgccttaagaaagggaagggtgaagaacaggctctggctgctgctgtgctaggcattctctgtgtgcagttgggccctggacccaagggcgaggagctgttccgtagcctgcagcccttgctcatctcggtgctcagtgacagtacagcaagccccactgcccggctccattgngcttctgctcttggcttgggttgctatgtggcttgccaccgacgtcca

SEQ ID NO: 246 - DNA, 542 bp, Homo sapiens
actgaggaaaggaaacctcgtgctcctggaaatggcctgatatgaaggagccacccctccagctttccctgtgggtgcctcgtccttcaggtacaggagctggctgaaacatcaggaatggaagccaatgtgactatcccaatctggcaaaacaagccacatggggctgctcgcagtgtggtaagaagaattgggaccaatctccccctgaagccctgtccacgggcatcctttgagaccctgcccaacatctctgacctgtgtttgaaagatgtccctccagtccctactctggctgacattgcctggattgctgcagatgaagaggaaacatatgctcgggtcaggagtgatacacgccctctgagacatacctggaagcctagccctctgattgtcatgcaacgtaatgcctcagtgcccaacctgcgtggctctgaggagaggctcctggccctgaagaagccggccctgcctgccctgagccgcaccactgagctgcaggatgagctcagccacctgcgcagccagattgctaaaat

SEQ ID NO: 247 - DNA, 542 bp, Homo sapiens
  misc_feature (1)...(542): n = A,T,C or G
tccgcactcctacgagccccgnggnncaggagtnctgtcatgccgctggtgcgctacaggaaggtggccatcctagggtaccgctccgtagggaagacatctttggcacatcaatttgtggaaggcgagttcctggaaggctacgatcctacagtggagaatacttacagcaagacagtgactcttggcaaagatgagtttcacctacatctggtggacacagcagggcaggatgagtacagcattctgccctactcgctcatcatcggggtccatggttacgttcttgtatactcggttaactctctgcgcagctttcagatcgttaagaacctgtaccaaaagctacacgaaggccacggtaaaacccggctgtcggtgctgcttgtggggaacaaggcagatctctctcctgagagagaggtgcaggcagttgaagggaagaagctagcagagtcctggggtgcgatgtttatggagtcgtctgctcgggataatcagctaactcaagatgtcttcatcaaagtcatccaggtggaggg

SEQ ID NO: 248 - DNA, 538 bp, Homo sapiens
  misc_feature (1)...(538): n = A,T,C or G
aacttgtcccatctggnacactgtgcttggggctttagatgttcaagaacactctttgggtgtccttgctgttctgtttgtgaagttctcaatgcccagtgttcctgacttcgaaacactattctcacaggttcagcttttcatcagtacatgtaatggcgagcacattcgatatgcaacagatacgtttgctgggctttgccatcagctaacaaatgcacttgtggaaagaaaacagccccttcgaggaattggcatccttaagcaagccatagacaagatgcagatgaataccaaccaactgacctcagtacatgccgatctctgccagctttgtttactagcgaagtgctttaaacctgcccttccatatcttgatgtggatatgatggatatctggtaaagagaatggagcctatgatgcaaaacactttctgngctactactattatggaggaatgatctatacggggctgaanaacttttgaaaagancgctgtacttttatgagcaggctataactactcctgcctggccg

SEQ ID NO: 249 - DNA, 537 bp, Homo sapiens
  misc_feature (1)...(537): n = A,T,C or G
gccatgaaagaatcatnatncattttatccaccacctcttcctcctgcaacaagagtgaggccgtcctctccatagngcagctgtaccacctggttgatggagttnctcacagttgcatcatatttcaccatcaccgactccatggactttatcagccttcgctgaatataccctgggaaagggaattaattgaaagacctgaggtaaaagcatgacaaagctcaaaatgcagagaccaaaattcanctttagatggagaatccccattcccatctccacaagagctcanaaaaggcctcaccagtctcagcagtcttaacagccgtgtcaatgagaccttctcgtcctcccatggcatggaagaagaactcantgggtgtgagaccanccaagtatgaattttntacaaagcctcgnctctcaggaccataatcatncttgataaagtgaggaagagtccgatgcttgaatccaaatgggatccgcttgccctctacattctgctgcccgacaacagcaatgacctaagggggatg

SEQ ID NO: 250 - DNA, 535 bp, Homo sapiens
actgaggcctggtaggggaggagtgtgtaggtgccatcgtttgcaagttggatatgcacaaaaagatgttccgcagaggttatatagccatgttagccgtggactccaaatacaggagaaatggcattggtactaacttggtaaagaaagctatatatgccatggttgaaggagactgtgacgaggttgttttggaaacagaaattacaaataagtctgctttgaaactttatgaaaatcttggttttgttcgagataagaggctgttcagatactatttaaatggagttgacgcactgcgacttaaactgtggctgcgctgaggaactgacagcaaggaacgactccacccacacggaagcgacttttgcatgcaatgcaatttgtgcagaattgctttgcaggtggatttagtgattcccatgcagctgttatctgtcagtgtccattgagtgtcgcacaatatttgttgcactttggcatggcgcatttgttctgaattaaatgaaattgttttaaacttcaaaaaaaaaaa

SEQ ID NO: 251 - DNA, 532 bp, Homo sapiens
  misc_feature (1)...(532): n = A,T,C or G
gactgaggctgttgaattggctgnctataatgggnaagaacctacattgtanaagagactgttggncagtatntttcaagcatnaacctccagggaaanccttttgtctctggtcttttgataggacagngctcttcacaaaaggattatgtgattcttgccactagaacaccacccaaagaggaacnaaatgacanngtcaaacngccnagagctaagttggataatttggatgaagaatgggccacagaacatgccanccaggagtctctgngncacccntggcaaagcttgagcannagaccttaacgcctacccccncagngacncanttnctncaacaaagctntgcctactncaccaagaccacacttgcnaatagnnccgttccccntgcctgagccnagcnttcaaacacatgagngcattggngccgtacctattcacaccaccacatctgncangaagnaggaanagcatagnngcgttggggctggatctgngaaaagnggggcatcaataaagatactgc

SEQ ID NO: 252 - DNA, 527 bp, Homo sapiens
  misc_feature (1)...(527): n = A,T,C or G
acgtgaaaaaattgtttcatcagctcatacgttgtgaaagccacagcttgagaggggatacagcggatgtagttcagagataagccacggtacaatcctctccgaatcccatgctgtccatagacgtacttcatggtctcccgcatggtactgaaaggcagtggaaaatgatatagcaaccatccaaaggggacaagccaccacaaggtgacaagacanctcaagagcccagaacagcttcgtttgtttggatggttccttcagacagaatggtgctctgcagcctgggctagctttggactataatcttctgcctcccaaatgctgggcaaagagggctatgccaccagaaccaacctagagtagcatttttaaaggaggcttaactggttatggttgctcaagcttacaatcttagcacttcagaagctaaaaggagtttcaagccaacttgagctacagagatagaatttgtatcaaataaaacaataaatatttgcatatataaatacacacataaaaaaaaa

SEQ ID NO: 253 - DNA, 524 bp, Homo sapiens
  misc_feature (1)...(524): n = A,T,C or G
gactgagtgatggtcagtcttcagccattcctgtagccagtgtggagtttgcagccatctgtctcagaaatgccttgttgctgttacctgaagaacagcaagatcccaagcaggaaaatggctccaagagcagcagccagcttggagggaacaccggaaagcagcgagagcagcgagaccgtgcagcagtaagagccatgatggagataaagttcattccctgctccaccgtcttctcccgntgaggaaacagggagttaagaaaaccttnaagtgcttcattcttgcttgcagtgcttatgtggctctggcccttaggtgataancctcatggcttttgaaccatgcagatcagctcctgcagcancccaagctggctggcttttnttaaattttgggcccatttatatggccggagaaagcccctnntcttcccttcaanagggatntgttgatgccnantaannnnctttgacccnaaaaaaatgncacttgatntctttcttttggggatcttttttaaa

SEQ ID NO: 254 - DNA, 523 bp, Homo sapiens
  misc_feature (1)...(523): n = A,T,C or G
atgatggccaagaactggagcgctgctgggaacgctttctgccaggctgcccaactgcacctacagctccaaagcaagcactgatgcagccacctgctttgnggacgctggcaatgcctttcaagaaagctgacccccaagaggccattaactgtctgatgagagcaattgagatctatacagacatgggcagattcacaatcgcagccaagcaccacatctccatcgctgagatctatgagacagaactggtggatgtagagaaggccatcgcccactatgagcaatctgcagactactacaaaggagaagagtccaacagctcagccaacaagtgtctgctgaaggtggctggctacgccgcacagctggagcagtaccagaaggctatcgacatctatgagcaggtggggaccagtgccatggacagtcccctcctcaagtacagcgccaaagactacttcttcaaggcggccctctgccacttctgcattgacatgctcaacgccaagctcgctgtttc

SEQ ID NO: 255 - DNA, 522 bp, Homo sapiens
  misc_feature (1)...(522): n = A,T,C or G
cagttccaaacagtgcacctgcgggagatctcaacccagctggagaagtggacatgaggttggcaggccccctgcgcatcgtggccctaatcatcattatgggtctcacctggatcctagtcaccatcctcctaggtggtcctggtgttggccttcctcgaattcagcagttcttcaccagcccagagaactcagtgactgcagaaccaagggccaggaagtacaaatgcggcctgccccagccttgtcctgaagagcacctgagctttcgaatagtcagcggggctgccaatgtcatcgggcccaagatctgcctcgaggacaagatgctcatgagcagcgtcaaagacaatgtgggccgtggcctgaacatcgccctggtgaatggggtcagtggtgagctcctagaagccagagcctttgacatgtgggctggagatgncaatgatctcttgaagttcatccggncantgcatgaaggnaccctggtgtttggggcatcctatgatgatccagctacca

SEQ ID NO: 256 - DNA, 521 bp, Homo sapiens
  misc_feature (1)...(521): n = A,T,C or G
gactgagatccagttgtgggacacggcagggcaggagcggttcaggaagagcatggtccagcactactacaggaatgtgcatgctgtcgtctttgtgtatgacatgaccaacatggccagcttccacagcctgccggcttggatagaggaatgcaaacagcaccttgctggctgaacgacataccatcgaattctggtgggaaataaatgtgacttgagaagcgccattcaggtgcccacagactnnncacacaagtttnttgactcacnctattttgcctntgcnncccancccangtgnataccnctntgnttttgactcaactgaaatctatattcatgaccttacnccanaagccaaagacccacaagccattgatgcttnnccagctgnctgataacagaattagcctgaaacctgagaccaagcctgcggtgacttgctggtgctgagtcataggtgtggccattgcgggtctgacttacctgaagagatgattgggaagtgtgacagtgatgaa

SEQ ID NO: 257 - DNA, 520 bp, Homo sapiens
  misc_feature (1)...(520): n = A,T,C or G
ccgtggctccacatactgctgcaccactntgagcacanactntgnctanctnatggtgtgnccntgcnnntactggtnctncntatanccanttgntantnaaaccctttatactcttgggcaangnatgttctgttcttgaaaganngggggggcccagaagtccagaatgcctgtgccaacccagcggctgggactgtcatcctgctggaaaacctccgctttcatgtagaggaagaagggaagggaaaagatgcttctggaaacaaggttaaagctgagccggccaaaattgatgctttccgagcctcactgtccaaactaggagatgtctatgncaatgatgcttttgggactgcacaccgagcccatagctccatggggggngtgaatctgccacagaaggctgggggatttttgatgaagaaggagctgaactactttgccaaggctttgggagaatccagagcgacccttcctggctatcttgggaggcgctaaagttgcagacaaggatcca

SEQ ID NO: 258 - DNA, 516 bp, Homo sapiens
  misc_feature (1)...(516): n = A,T,C or G
gactgagggttttatgacgcttnaggctgtggctgaatctctgacctgggaagcagtgggaacagctggctgcanntcggaaaggtttctgtgaanagagcacaaaggacgctggnagcacagttgtgcctggcttggaaacacnaactgtgaacacagatgtgattctaaagcagganattttaaaggaggcaganccacaggcatggctacaagaagtatcccaggtaatggtcccancacttaccanatgtggngaccnctctgaggactgggaanaaaagctgccaaaagctgctgtnctgctgcngctccagggttntgaagagcnnggacacacgtgncatcccgnttctcatcgntgtgtccagagaggaaagggactctaanaacaatgagtctgagaacagtggcagntctgtncttggtcannacatccagacagcanaaggactggncaccaacagtcagtgtggggatgaccacanacaaggntnccatgtgaaatgccattca

SEQ ID NO: 259 - DNA, 515 bp, Homo sapiens
  misc_feature (1)...(515): n = A,T,C or G
tactcgcccttcgtggtctccttccataagcactactatccctgggtccagctttccggacacgctgggaacttccaggccggtgaggatggtcggattctgaaacgtttctgtcagtgtgagcagcgcagcctggagctgctgatgggagaccccctgcggccttttgtgcctgcttattatggcatggtgcagcgggatggccaggccttcaaccagatggaagatctcctggcagactttgagggcccctctatcatggactgcaagatgggcagcaggacctacctggaagaggagctggtgaaggccagggaacgacccaagccccggaaggatatgtatganaagatggtgggcagtggaccccggggctcccaccccanaaaagcatgctcaagggngccattcacgaagcccccgatacatgcagngggngggagaccctgantttnactttccacgcttgggcttttccggattngaaggncatcaanaaaggctgatgggacctg

SEQ ID NO: 260 - DNA, 508 bp, Homo sapiens
aggagaagcccaagctccctcccagcagggcccagtccttgagctatgccttagcgaccactgatgcttcctacttaagttccattgtccgactcttcaaaaacctcaacttcgtgctgctggtcatcacctatggtctgaatgctggtgctttctacgccttatccactctgctgaatcgcatggtgatcttgcacttcccgggggaagaagtgaatgctggaagaatcggtctgaccatcgtcattgcaggaatgtttggtgctatgatctcaggcatctggctggataaatccaaaacctacaaggagacaaccctggtagtgtatatcatgactctggtgggcatggtggtatacacattcaccttgaacctgaaccatttgtgggtagtattcatcactgctggcacactgggcttcttcatgactggctatctgcccctggggtttgagtttgctgtggagctcacatacccagaatctgaaggcgtgtcatctgacgccag

SEQ ID NO: 261 - DNA, 507 bp, Homo sapiens
  misc_feature (1)...(507): n = A,T,C or G
ctgccaggaagcactgggctggtgtccatatnanagaagnatnaccntntatggagacttctgctaatgagcaaaacaatggtggatgagctctttgcagaaattgtgcnggcagatgaacctatgcagctcagcctgacaaagatgacccatgctgttctgcctgtaacatacaatagcatccgaacatggcctgccccggacaggattcgtctaggctcgtaggcaacagtaaccttgtctactgcactgcagtttgtaggatgggtggtgtgtgagtccacggtgcactgcaaccttcaggccggatggccagctgatgcctctgagtacctgtgggttccgtgactacagcctccacttctgtcctcagtccttgtacatctgcaacctgaaggccccaccgccaagctacagggtgacctcatttgacgtgatgatggcattgctgttgaggtgacagaagccactgttgtgtaaactaaaaataatcatgagagagaaact

SEQ ID NO: 262 - DNA, 504 bp, Homo sapiens
  misc_feature (1)...(504): n = A,T,C or G
actgaggtggtgaattcttactctgttgggaacacaggaacatttgtgagcaggaagtatgcctcccaagttcaagcgccacctaaatgatgatgacgtgaccgggtctgtgaaaagtgagaggagaaatcttttggaagatgattcagatgaagaagaggacttttttctacggggaccatctggaccaagatttggacctagaaatgataaaattaagcatgttcagaatcaggtggatgaagttattgatgtaatgcaagagaatattacaaaggtaattgaaagaggagagaggctggatgaactacnggacaaatcanaaagcttatcggataatgccaccgctttcagcaacagatccaaacagcttcgaaggcaaatgtggtggcgtggatgcaaaataaaagccatcatggctttggctgcagcgatccttttgctaatgattatcattcttatanttgtgaaattccgtacttgatttgatgacagagaccctga

SEQ ID NO: 263 - DNA, 501 bp, Homo sapiens
  misc_feature (1)...(501): n = A,T,C or G
gaggagtccgttcgaactggaccaagctgccccacctctcttcagtaaagtggttattgtgttgatagatgcattaagagatgattttgtgtttgggtcgaaaggtgtgaagtatatgccctacacaacgtatctggtagaaaaaggagcatctcatagctttgtggctgaggcaaagccacccacagttactatgcctcgaatcaaggtggataaaaatgtcacaaggcatttggacaaagtattaaaaagaggagactgggatgtgttaatccttcactatctaggactggatcacattggccacatttctgggcccaacagccccctgattggtcacaagctctngcnaaatggacagtgngctgatgaaaatccncccttcactgctgntcgaaaggactgaaagactctcttacccagtncgctggntctcnngtgncgaccatggaantgncctgnaactgcnagccntggcgncctctttcacctgaggaagtg

SEQ ID NO: 264 - DNA, 500 bp, Homo sapiens
  misc_feature (1)...(500): n = A,T,C or G
aactgagcatcctaatgtcctatgatcatgtggagcttaccttcaacgacatgaagaatgtgccagaggccttcaaagggaccaagaaaggcaccgtctaccttactccgtaccgggtcatctttctgtctaangggaaggacnccatgcatntcctttatgatgcccttttaccngatgaaggacntgtgatattaancacccggngttnngngccancttnattaagggaatagtgaaggctgaagcatgangtgnctggaaaggntncncntcntacannctgaccttnacagcagggggcgccattnagttngngcanangatgctncagntngnatntnnagccttcnaaggtgaagtccccaatgggagtactatggctacttgttanatgcnnagcgnggcctaagtgtttactncgncagtcgnaaatgggaatgtacncctgcanntcntgnntatggntatacagcacccgcgacccggagtgctatcca

SEQ ID NO: 265 - DNA, 497 bp, Homo sapiens
  misc_feature (1)...(497): n = A,T,C or G
ctcctgagcccttgccgctgtgacggntcagtgcgttgcacacaccaaccctgcctaatccgctgggannagtgagaggggctcatggagctgtgagctttgctacttcaagtaccaggtcctggcgatcancaccaagaatccactgcagtggcaggccatctccctgaccgtnatcnagaaggtccanattgctgctatcgtcctgggatcgctgttcctngnggggngnatctcctggctcatctggncctcgctcagcccttcagccaagtggcagcgccaggacctcctcttncanatttgctatggcatgtacggcttcatggatgtcgtcttcatangcctcatcgtccacgaagggncttctgtttaccgnatcttnaatcgctggcaggccgtgnaccaccagtggaaagtnctgnnctatnacaagaccaaggacgtgggaggagacacagggggaggggcggcagggaanccaggccccaggacct

SEQ ID NO: 266 - DNA, 495 bp, Homo sapiens; identical to SEQ ID NO: 19
  misc_feature (1)...(495): n = A,T,C or G

SEQ ID NO: 267 - DNA, 489 bp, Homo sapiens
actgagtgtggatctgcagcagcaaatcatgactattgtagatgagctgggcaaggcttctgccaaggcgcagcacctccctgcacccatcaccagcgctttgaggatgcaaagcaaccggcacgttatttacatactgaaggacacctcagcccgaccggcagggaaaggagccattattggtttcctcaaagttggatacaagaagctctttgtactggatgaccgggaggctcacaatgaggtagaacccctttgcattctggacttttacatccacgagtcggtgcaacggcatggccacgggcgagaactttttcagcatatgttacagaaagagcgagtggagccccaccaactggccattgaccgaccatcgccgaagctgctcaagttcctgaataagcactacaacctggagaccacagtcccacaggtgaacaactttgtcatctttgaaggcttctttgcccatcagcaccgtccagc

SEQ ID NO: 268 - DNA, 488 bp, Homo sapiens
gaactgagctgaagatgtccacctgcttggtcagctgccccactctgatgaagtgttccggcagatatgcagctgaggcctggaacaggaagcactgcctgccgtcatcattaggccaggggctctgcaccggaagcttacctgaggcagagctgcatctctgcctgtaggaatctgtccatggaccctggactggagccggccacctgtgggaaaatacacagcccctgaagacccatccaccctcagcccccggcctcactgctccctgcagacaccctcacctcacctccctgagcttcttgaaggcgaaggccacaccgttcctttgaccctggtagatatcggcaaaggtgccctcgctgattcggtggctttggtcaaagtcctcagttgcttggacgacatctgcttcactccagaaaagcctgtctccgggcaaacccaaaagcctttcttgcttgggggcagatgtggaagtactgctg

SEQ ID NO: 269 - DNA, 483 bp, Homo sapiens
  misc_feature (1)...(483): n = A,T,C or G
atttttcagttgcatttttaagnangnaggctcatggtgcaaattgttatttccagggaatccctgtgctgatcgtgggccatcatatcctgtatgggaaaaccatccacctggagaaaccttttgcagtccttgtcaaacacactcctgggaagcaggactgtgatgagcccggtcgagggactggcacccagtacttggtgacagcactcatcaaaaacaagatccttttcaaaactcgccccaagcctattatcaccaacgtccccaagaaagtatgaaagaaccccggattttccctagagagcgaccaactccttggactcgtgctccattgccacctcgaggacggctggacggagggcctgttatgaacgcaggccacccaatgggtgtgaactcagatcctttccttatggcagcaggttctcttggtggaaacctggctccatttccaagggaatgcagctccttttcagaatc

SEQ ID NO: 270 - DNA, 481 bp, Homo sapiens
  misc_feature (1)...(481): n = A,T,C or G
gaccatgcactgactcacagtnntgacagaagtcttnttnatacccagtaagggacactgcctcactgccatcncnagcnancgctntntcanttcatgngccacttgncacanaagaaanggtngcggctgagcaancacgtgtngcatcgctgtttgagaacaagnctgagggacctgncnatgaaggacnttacaganaacnacttnccanaaacatnagtttttgttagctagaacagcacgagtcaccttcatgtccactgacgatgggtcaccctgctgnagcgnccactcataaaggacaanggcgtggangtccgagctttctcgaccatctagaactaccccgtctgtgggcagatgtaaaaccacatccttcccagccttgctaacgggaggcttgtcctcatctgtgaaagagaagagacaggagaggcatgcctctctgattccccagctgatgaacagcaatagctct

SEQ ID NO: 271 - DNA, 468 bp, Homo sapiens
  misc_feature (1)...(468): n = A,T,C or G
agttgcgcatgcccccaaggtcaanaagccagggaggaagccatagncncctgnccctgngaaagcagaggccgccactgntgaangganaccgtaatncctcacctagctctggtgncanctccagcccaccaggtcccaccctgagggcccggntgcgcaacctgttagaaaatgcctggctcaacggngtggcactgcctacttggggtcacaaggcctccggagcagatnngaccttcgcctcacccccagctcttgggcangncagacccatnatcttgtancattgttaccagggctatttgtggacagtccaccatcncgggngactgntgnagnaccttgnccttgacatncatnctgcccagggctaaggngttgnatnatnagngntggagcnccanccttaaccngggcaanagaactttgcctgaaccttttnaaacttngaaggatcacctttct

SEQ ID NO: 272 - DNA, 467 bp, Homo sapiens
  misc_feature (1)...(467): n = A,T,C or G
gctgcttcctacctttgactggagacgtggnctacctcatcgtagacaccccgcctggcacgtctgacgaacacctctcagtggtccagtacctggctgcggcacacattgatggggcagtgatcctcaccacccctcaggaggtggccctccaggatgtccggaaagagatcagcttctgccacaaggtgaagctgcccatcattggtgtggtagagaacatgagcggtttcatctgccccaagtgcaagaaagagtctcagatcttccctcccacgactgggggtgcagaggccatgtgccaggatctgaggattccacttctgggcaaagngccgctggatccacacataggcaagagctgtgacaaaggccagcntttttttgtcgaagcctccagatngaccagncacagnctnnctacngaagtatanttcagaggatnccgagacttttgttattctcat

SEQ ID NO: 273 - DNA, 460 bp, Homo sapiens
  misc_feature (1)...(460): n = A,T,C or G
gatctgagttcgtgcccttcagggtctatgtggaccgcaccggcaaccacgtactgagcatggcccgcctggcccgggatgttctggctgagattccggaccaactgntgtnctacatgaaggcacagggcatncgcccacgcccnccanctgctgcacccgctcagtcacccccacagtncccancccactcacctcctggatcccccgtgcacacgcatatctgaagctgagaggaccaagggcctggagggtaggctgacaccctanaataatantanaaaggcttcccnttnttttgcttngagggccagcnnnaaatggggtgtcagggncttacaccacttgacacncaaattcaggggactgtggtatacaaaacaagnggtacacngattatggggctgaggggacccaccctagtccatgccngacaactncnagacttttttatttttgc

SEQ ID NO: 274 - DNA, 460 bp, Homo sapiens
  misc_feature (1)...(460): n = A,T,C or G
ctgtggcagaagtaaaacttcnagtatgaccagtatacattagaacacatgcatgcttttgggatgtataattatctgcactgtgatgcctggtatcaagacagtgtctactacattgataaccttggaagaattatgaacttaacagtgatgctggacaccgccttaggaaaaccccgagaggtgttccgccttcctacagatgtgacagcatatgacaatcgtctttgggcatctatccatttcacatccccttcctgggttaccttgtcagatggaactggaagactgtatgtcattggaacaggtgaccgtggaaacagtcctgaaaaatgggagantatgnttnatgaananntnggaanntcttttnttatnnntnncagtatctcactgnngagagntgaagaacnttgagggnctatcctgctntnttnaattgagaaggaggaattggacc

SEQ ID NO: 275 - DNA, 459 bp, Homo sapiens
actgagggatggatccggtccgtcagatcccagaggaagttttgttcctgcatgtaaatgacggatcttctttggaaagccttcagattgttgcggattcaagcttcgacagtagagaattgacttttgggagttctgtgcaagtccaagggcagcctggtcaaaagtcagtccaagaggcaaaatgtggaactgaaggcagaaaagattgaggttattggagactgtgaagccaaggcattccctataaagtataaggagcgacaccctctggagtacctgagacagtatcctcacctgaggtgcaggactaatgctctgggttctatattgagggtccgcagtgaagccacagctgctattcattcctactttaaggacaatggctttgtgcacattcataccccagtactcacatccaacgactgtgagggggccggagagctttttcaagtggag

SEQ ID NO: 276 - DNA, 443 bp, Homo sapiens
  misc_feature (1)...(443): n = A,T,C or G
acaaatctgaccggatgggctcagngggcgctagncagcatgaaactcgtnacacctatccaaattggaagnacaccgtcgacacatnccctanaaacttattgaagggtggtacagaggctacaccttaaggaaaaagtctaaaaagggnatatcttnctgnttacatnttttcnttttataagannccannagtgagaaggaaanagggcnccatcgnnaccgttcatccctggggacctcccccttatacaggaaagtcaccacaaacgcttcgagagtggtctaccatctggaggcaactttatgtggtaagaaactgggatgctcagttaaagattaaaaatccagagcggtgtttctggtccctgtaccaaaatagacttttccctttccctgggaaccctangaagaggagaggctctgagcaagggtctttgctt

SEQ ID NO: 277 - DNA, 441 bp, Homo sapiens
  misc_feature (1)...(441): n = A,T,C or G
actgtaatgtctgtactttgtccagtgtcgaaattcagtttcatattgctcactcatatgaaacccagngttttggtaaagnatcaacaacctccatttcaaactgggtccacacgatatctccaagcagctagcactaatgatcagaatcagaatggaaatcatactctgcctcagaattcaaaaggggatgcccaaaatcacttcttacgtattcctacctcagaagaacaaaagatcattaactttaccaaagagagcaaggattcaagaagtaaatccttgacttctaaaacaagtaggaagatagagacacatctaatatctgtgttaatgcaaagaagcattctaatcgtatttatcagatctcatcagttccgatttccagccttaataataaagaatccgtgtcaccagatttaatagttgtaaaaaaaaaaa

SEQ ID NO: 278 - DNA, 418 bp, Homo sapiens
  misc_feature (1)...(418): n = A,T,C or G
tgagtctttatagtaaaagctgaaggaaaagtggaatcagatttcttttgtcaattaggtcacnttcaatctcttactggaagattattcaaaagcattgncatcttaccagagatacatacagtttacagactgacntactggaagaatgctgcctttttatatggncttggttnggtctatttntactacaatgcatttcagngggcaatnagagctttnnnggaagccctttatgttgaccctaatttttgcagagccaaagaaatccatttacgacttggntttatgntcaaaatgaatacagattatgaatctagnttaaagcattttcagctggccctgatcgactgnaatgtctgtactttgnncagngtcgaaatncagtttcatattgntcacttatatgaaacccaga

SEQ ID NO: 279 - DNA, 405 bp, Homo sapiens
  misc_feature (1)...(405): n = A,T,C or G
tcaccaactacctacaggcccggcaaganccanacgcccgngntagaggtgaacttgtgtctcactttctgaccagtgacatggacagcctgtcctacctgaagaaggtctctacagagggccacctgtataacggctttaacatcatagcagctgacctgagcacgtcaaaaggagatgttgtttgctactatggaaaccgggggggagcctgagcctattgtcttgacaccaggancctatgggctangcaatgccctgntggagacgccctggaaagaagctgtgctttggcaaanaactnttcntggaagcantggancaaancgaancntttcctaaggacgtncttgtcactcagctactaaatgncctcaacaatgaggaggccagcttgccaggtaa

SEQ ID NO: 280 - DNA, 401 bp, Homo sapiens
  misc_feature (1)...(401): n = A,T,C or G
gactgaggccatgaacctgcaagtgtaatggctggnaaaaccccaagccccccaccgnaccccgcatggacctncancagccngctgccaacctgagcgagttgngccgtancatgtgagcaccctttggcggaccatgtgtcccacctggagaatgtgtcagaggacgagattaaccggctcttgggaatggtagtagatgtagaaaatctgttcatgtctattcagtgagtagccttcacatggaaacagcccagactggaggaaccatgaggggccttggcttatcctacactgttgtctatctgtccctccaggattgggggcaggaggaccattcattccttggcattaatccctcggagggaacaataaagctttttttttcccaaaaaaaaaaa

SEQ ID NO: 281 - DNA, 400 bp, Homo sapiens
  misc_feature (1)...(400): n = A,T,C or G
gactgagaaggcggctgggctttggcgcagngganaccaacctaagttttctgccttggagatgctggagaattcgctgtncagccccacctgggaaggatcccagttctgggtaacctcgcagaagaccgaggcttctgaacgctgcggcttgcaaggctcctacatactgagggtggaagctganaagcctgactctcctgactttgggtgcgcagagtcaaatcctggagccgctcnttttctggccctacactctgttgcgtcgctatggccgggacaaggtgcatggggctgtctgggaggatgacccgtcagggagggctaccaggttgagtagctgtaggtgacaattccattctcaggtggtctcttctgtgcagatacagtaaaaaaaaaa

SEQ ID NO: 282 - DNA, 399 bp, Homo sapiens
  misc_feature (1)...(399): n = A,T,C or G
aatccccagaggggcatgcagntgcacactgtaggctgtggcacctgcctttgacttccacaaagagatcgactacatgttcctggtgggcacagaagagggaaaaatctacaagngctccaaatcctactccagccagttcttggacacctatgatgctcacaacatggcagtagacgctgtgctatggaacccataccacaccanggtcttcatgtcctgcagctctgactggacagtgaagatctgggaccacaccatcaagacccccatgttcatttatgatctgaactcagccgtgggtgacgtggcctgggcaccgtactcttccactgtgtttgcagcagtcaccacggacgggaaggcccatgtgtttgacttagcggtcaacaagtatga

SEQ ID NO: 283 - DNA, 391 bp, Homo sapiens
  misc_feature (1)...(391): n = A,T,C or G
ggccctgcgttgatgtggacgccacagtcannctgcnggnanatggagctacccacggtgtnggtgatgcccanggacagngcacctcnatccttacngtatctgcanctgccaggagcntgnntgcngtcncacctgcaacacnagcgatgcttgggcnactctgaggncatggnatcanntggagnacgccttcncctggtgtgaagatgacatctgggaaaggctcactcagctatggcaaagtactcctcccttgaccagaaccacatcgctccatgctaccccctgctggacagtgtgggcactgcacatagctggcctagagggcttggacacagcccaccaccagctgactataaagataggactctcaacccaaaaaaaaaaa

SEQ ID NO: 284 - DNA, 390 bp, Homo sapiens
  misc_feature (1)...(390): n = A,T,C or G
actgagtttttgggaataacgtttcttggaatcggactgtgggcgtggaatgaaaaaggcgtcctactcnancatcnngtccatcaccgncctcgnnggcttcagacccagngtgnccttgntccttgtggttggnaggagtgatgtncattcntgnggttgtncagggtgcatncggagcaccttctgnacnanacngtttcntntcaagttntntngctgtgcccctnggggatcattctttttctggaactcacctgntgggntgtnggcntttgtnttnaaanacnggatnaaagaccagctnnatttctttattaacaacaacatcaagagcctacagagatgacattgatctacagaacctcatagacttcacccaaggaatat

SEQ ID NO: 285 - DNA, 386 bp, Homo sapiens
  misc_feature (1)...(386): n = A,T,C or G
ggggaatttgtgaccagnaagtgtgagagccgacagggccgtcaccagtgcctctgtgaagaaggttatatcctggagcgcgggcagcattgcaaatccaacgacctccttcagtgcggcctccattatcttctctaatggtcgggatttgctagttggagatcttnatggaagaaacttccggattctagcagagtctaagaaccgnggaatagnnatgggagtggattttcactatcanaagcacagagttttttggacagaccccatgcaggcgaaggntttttccactgacattaatggcttaaatacccnacaaantcttaatgnttctattgatgctccagagaatctggctgtggattggatcaataataaactttatc

SEQ ID NO: 286 - DNA, 380 bp, Homo sapiens
  misc_feature (1)...(380): n = A,T,C or G
actgaggctcgtccccatgactaaactgaatgcccaagtcaaaggctctctcaacatcaccactcccgggatacagatatggaggatccgaggctatgcagatggtacctgttccttccagcacctttggaagcttcttcgatggtgactgctatgtagtcctggctgtangtggaacaggccaggacaggtcctgtcanaaaagcanagcctgntgggnattagggangaagctanaggctgggggcagngntgatgnatggtctagcttcattagtcactgttaagcnagagtgaccaggactacagctgnggggctccatggggcttagaaatgtttgnaaaagtcctttctagctnaagagctaaaaactcattca

SEQ ID NO: 287 - DNA, 366 bp, Homo sapiens
  misc_feature (1)...(366): n = A,T,C or G
aactgaggaaagaatcccaactccattgncacatggcctggccgacggagcggctgtatgatcgtcataacttccatcctctctgccctggccggcctcttgctcctggctttcctggcagcttccactacgcgtttctccagcctgtggtggcccgaggaagctcctgagcagctgcggattggctccttcatgggaaaacgttacatgactcaccatatcccncccagcgaagctgccacactgncggtgggctgngancctggnctggacccccttcccagtctcagcccgtagcctggtctntgtancttggncctggggtgaggggcagagagcagatgtgcaggtcctgtggggtggggg

SEQ ID NO: 288 - DNA, 351 bp, Homo sapiens
  misc_feature (1)...(351): n = A,T,C or G
cagaccctggacagacacctgcggtaactcacagaaagatngcnacccacccctacntgccccagnatnttgccagngagacttcatttncttgngcantggancacccaangccagaagaaagggctccgaaatatnaaaattatttttcagcctncgaaacaccctntttaaaaaganaattgagttggtaccnaggacgaaggccaagaaccgctttcacccataaccaggnccaagtattggaaaatgtnnttagggggaacngctacccttgcgttgacctnagagnggagctanctcaaaagctnanttagaggaagacagaatncanatttgggtccacaatcg

SEQ ID NO: 289 - DNA, 344 bp, Homo sapiens
  misc_feature (1)...(344): n = A,T,C or G
gatgtgcagcccccatagggcaggagccgagatggcctgctgacagtgaacctgcgggagggttcccgcctgcacctgtgcgctgagacccgggatgatgccataacatggaagactgccctgatggaggcaaattccaccccggtncgcgtctacagcccatatcaggactactatgaggtggtgccacccaacgcacatgaagccacatatgtccgcagctactatgggccaccttatgcaggtcctggtgtgacacacgtgatagttcgagaggacccctgctacagctcangagcccctttggccatgggcatgcttgctggggctgccacggggacgtc

SEQ ID NO: 290 - DNA, 340 bp, Homo sapiens
tggctgtgcagctgccgccaggtgaagatctcaacgactgggttgccgtgcacgtggtggatttcttcaatcgcatcaacctcatctacggtaccatcagcgatggctgcaccgagcagtcgtgcccagtcatgtccgggggccccaagtacgagtaccgctggcaggacgagcaacgcttccggaagcccacggcgctgtccgcaccccgctacatggacctgcttatggactggatcgaggtgcagatcaacaacgaggacatcttccccactaatgtcggcacaccattccccaagaccttcctgcaggcagtgcgcaagatcctgtcaaggctgtt

SEQ ID NO: 291 - DNA, 332 bp, Homo sapiens
  misc_feature (1)...(332): n = A,T,C or G
gactgagattagcacagtgatccagtctcgagtgaatgaccaggaaggccgagtaagaattctatgttcactatgtgggctttaacaggcgactggncgaatgggtggacaagaaccgactcnnactgaccaanacagtgaaggatgccgngcntgaagaacatctgacaaatacctgagtgagcttggcctgagcagccagagcccaagatcacctcnaaaccaataagcgaaagcatgatgagatnaaccatgtgcagaaggnccatggcccctcccttctcaggaccatcacaacaaagccatagcaactcccatgtgaaaaaaaaaaa

SEQ ID NO: 292 - DNA, 328 bp, Homo sapiens
  misc_feature (1)...(328): n = A,T,C or G
actgaggtggggtctttctgagagacatggagctgntgggacagaacgaagtggaccgccggcagcgcangttggtcatgctgagccaggactgcgttctacaaggntctgacggccgagcagaaggccaaggcgtttgaagggacagtacaattttagaccacncagatgcattttgataatgatctggtgcacaagaccctgaaaaacattgntgaaggcaaaactgtcgaggtccctgcctatgattttgtgacccacncaaggttaccanagancacntgtggnnnacccagctgntgtngnttctgttcgagggcatcttgga

SEQ ID NO: 293 - DNA, 323 bp, Homo sapiens; identical to SEQ ID NO: 20
  misc_feature (1)...(323): n = A,T,C or G

SEQ ID NO: 294 - DNA, 323 bp, Homo sapiens
tgagatcttagcaaagctatgtctcaagatggtgcttctcagttccaagaggtcattctccaagaactagaattatctgtgaagaaagaattagaaacatatcttctgtgttgaacaagttggtggtagtgaaactcaatggtggtttgggaaccagcatgggcctgcaaaggccctaaaagtatatgcctggaactggaccacctcactgtttcaggagatgtgacatttggaaaaaatgtttcactaaagggaacagttattattattgcaaatcatggtgacagaattgacatccccccaggaagattataaaaaaaaaa

SEQ ID NO: 295 - DNA, 319 bp, Homo sapiens
  misc_feature (1)...(319): n = A,T,C or G
ggacagctagtgaccgtaaacccctntgggcancgcnngggataagcttccgaggggactgtggaaggagccgcggctcgcacagngnacctcttgccctgcatcccagcgaggactttttggtaagatgtaccgggattcttcattttcttaaagccctgangtgnagagaactaaaggacggttcttgatggnacnctcanaaacnnnnttacaccccanncccactgntccctngcactccgtcaaggctcgcttctgttccaactcatctgcgaattncacaaaaccatagcccctggagggaaaaaaaaaccaa

SEQ ID NO: 296 - DNA, 317 bp, Homo sapiens
  misc_feature (1)...(317): n = A,T,C or G
gaactgaggtggggtctttagcctcctcccaggggcccgacacacgttccacttggtgcaccaccactgatgcctcctgagggtgctccacgtgcacgctcaccatcgatgctactcctgagcagaggcaagatggacaatgggatatatctacacgagctctgacttgctaggagtagattggagagggcncaccttnnnangggctcacnganagaaccatagataggaaaaaaggacntggagnntanggnaggaanncncnantgatagggncattgnttaatntntnangttattncactgcctgcccttgg

SEQ ID NO: 297 - DNA, 315 bp, Homo sapiens
  misc_feature (1)...(315): n = A,T,C or G
ccagcctgagccccgnccgtgggcacagagnttgctncacctgcagnctgtncctgcnggacctcaccgtcgccncgtccgagtgcattgacccctcagnggtctttccctacccgctcaacgacagcagctcgcccaaatcctgtacctcgtccgattccacggccttctctccttcctcggactcgctgctgtcctccgagtcctccccacgggccagccctgagcccctagtgctgcatgaggagacaccgcccaccaccagcagcgactctgaagaagagcaagangatgaggaagaaattgatgtggtgt

SEQ ID NO: 298 - DNA, 309 bp, Homo sapiens
  misc_feature (1)...(309): n = A,T,C or G
gagcttcaacatccaggccaggtctctgcctcagaaagtcagtgcgaccgccattgtcccctgcctctcacctcctgggtcactggtatttgaggattttgctaacctgacaccctttgtcaaggaagagctgagattcgccatccagaataaacacctctgccatcggatgtcctctgcgctggagtcagttaccgtcaacaacagacccctggagatgtcagtcaccaagtctgaggcggcccctgaagaanatgagagganaaggaggctggcgaganagaaataaaattgctgctgccaagtgtc

SEQ ID NO: 299 - DNA, 307 bp, Homo sapiens
  misc_feature (1)...(307): n = A,T,C or G
gggaactgcctaggacttgcctacttttcactgcaggaagtcttctgatctacagttgccagnagacggaagcacacacctttaggnagatcgtttacattaagctggnagagcccttgnctgcttgctctaaaatgctgaggnactggggagagataccaataccgtaaggacagaccaacagaagttcctttgatctgctcccacgggagttccgtntggtggaagnncatgacccgcccctgcaccagccctcagccaacaagccgaagccccccacgatgctggacattccctcagaaccgtg

SEQ ID NO: 300 - DNA, 303 bp, Homo sapiens
  misc_feature (1)...(303): n = A,T,C or G
ttatctgcgcatcatggatccttacaaggcaagttacggtgtggaagacccagagtatgctgncacccagttagctcagaccactatgagatcagagcttggcaaactctctctggacaaagtttttcgggagcgngagtccctgaatgccaacattgggggatgccatcaaccaggctgcagactgctggggtatccgatgcctgccgatacgagatcaaggacatccatgngccacctcaagtgaaagagtctatgcagatgcagggtaaaggcaaagcgcccggaagcggggccacagtt

SEQ ID NO: 301 - DNA, 280 bp, Homo sapiens
  misc_feature (1)...(280): n = A,T,C or G
tgagtaactagttgtacccaccatantacacanggacacacagccggnccctgnagcccggaacaggcncacacggtacacacnggtaggcaggccaggcacangcatccagcangacccgccagcacccgccacgcagacactggacgagccggcgcggtcaagatgttcacccgacgcggncangatgtatgtgccaccgaccctcgcnccgntggatggacggacggncncatncnatcagcgtncaccggtcactgtccccacccacagtgacgtt

SEQ ID NO: 302 - DNA, 278 bp, Homo sapiens
  misc_feature (1)...(278): n = A,T,C or G
gaactgagctcttcccactgcagaccgncggcccccttaccatgcaccttccctcagagtgatcccaggctccagggggagctaagaccctctttctccccttacctatccccagactcttccactccatataatacttcccttgctggagcccccatgccagtaacccacctttaactggcagggacngcccagggccaaccccacagacccctacagatctccaaggaaccagaatgcacactaaacacaattttgtacaattaaaaccatgtttc

SEQ ID NO: 303 - DNA, 272 bp, Homo sapiens
  misc_feature (1)...(272): n = A,T,C or G
agtctgaccttgtaccgtttgatcgttattgcccaccctggtagaagcagcacagttgccgagcttgtgcgagacagacagggatggatggtgcggtcaccggtgtcagcatcaaggcggaggtcctgccagcgtcactncagcccaccactgncanagctgcccccaggctgagcagtatgtgctgggacaacacgtgtcattttaagtgcttaggggaaacgtgggttgccctttgtcttgctccattattgcagaacacttttgtgtgt

SEQ ID NO: 304 - DNA, 271 bp, Homo sapiens
  misc_feature (1)...(271): n = A,T,C or G
atgagttccgcaggcatggaactgactagctcccaggacaggaaggcttggcaagttatnagttttttgcctaagactgccaagtgattgncaggataacattggaaaaaagaatttgaccctggnatcatcttcccgcgggtcagattggttaatttncaatcaaagcatcccagaagnacccatgaagcaaagaaggccctgtcagggcagctnctgctgtggggcgatcctatgtgtgtggaaatctactcaagacttttgagggaga

SEQ ID NO: 305 - DNA, 270 bp, Homo sapiens
  misc_feature (1)...(270): n = A,T,C or G
gtgtattacgcacatcggctggcannnnngagaacaganagggactgnccatgcnccctgnggtcgtggnancaatancgagggcgatttggnaaagntttcntggaacgcagnggtgacccggnctgacagngggcacttgtatgccatgaaagnnttaaaganggccacgctgaaagtgcgtgaccgngttcggaccaagatggagaggaagcagnanagcanttttggggaaacctgctgtctgccactanacagagatcacaggag

SEQ ID NO: 306 - DNA, 263 bp, Homo sapiens
  misc_feature (1)...(263): n = A,T,C or G
ctgagcaacatagggcggccgcatgaagcgcttgggagactttctgaacttggaaaactttgatctggctctcctggatgaggngtggagtgagcaggactnncagaacntanggcnnaggcgtatcttgttcacctatcnagatgcacacgtacgttcanaagcgnggatnanaggcaaagtnctcatgggcgnnctccnnncncccantcctgganaggattccancttgtctacaggcgtgnatggtgaccaaatacatg

SEQ ID NO: 307 - DNA, 262 bp, Homo sapiens
  misc_feature (1)...(262): n = A,T,C or G
gaactgagatctccgtctcccggaaccagggctgctcatctcgtgaggagaaaatcttgaccgccacgctttcgccatgccacgaaccgcgccacacctcgccatatcaggccctttcctaatccatggccaagggaagaataaggatcacatactagacacacatagccctagaagaccccaccccaattctggatgctataaagatcccctctgtaaaaatcggattttttttaancttttttttttttttttttaaaaa

SEQ ID NO: 308 - DNA, 247 bp, Homo sapiens
  misc_feature (1)...(247): n = A,T,C or G
tgaagttaacgttacgcgctctgccttacaaactgnaaccagctcaatacgccgctttcagttcctgcagaaagcccgggccttgttggacctgtgtgctgcgcctggcggatggntacntntggcnggcactgttatgannacannnacctntatntgatgagcttaccagttgttnattcaaggatgatgngaattnnattacacaattcatattaaatattccataaactgtgtctctctcaac

SEQ ID NO: 309 - DNA, 246 bp, Homo sapiens
  misc_feature (1)...(246): n = A,T,C or G
ctcactcttctaaaaaancnccccnancttnaagaagccttgnggacacntcctacaaaacattgagatttgctttnagggcctccctgaaaaccgctatctaccgtataaccaccacgtttggtgaacatctgaacgctgngcaggcatctgcngaacatcanaaaagacttcancaattcttgtnagnncaaagaatantgangnaatataaactgtgttcattaccctgctgatacaactaca

SEQ ID NO: 310 - DNA, 238 bp, Homo sapiens
  misc_feature (1)...(238): n = A,T,C or G
actatcacaggcaggtagnatatggcaagaagacatgcgtatgtcagttttaagccatgtatgaccaggcatgaaagaagcttgggtcgggctggtgatgactatgaagtgttggaactagacgatgttccaaaggagaacacctcaggttccagtncattggatcaagtccatcctgctttaccaaatgaacctacagttgaaaaaagtgaaacagaaatttctactaaaaaaaaaa

SEQ ID NO: 311 - DNA, 235 bp, Homo sapiens
  misc_feature (1)...(235): n = A,T,C or G
gagtgccctttagcgtctgggnncaggnggctgcgtggctannacacagcctgtcgcctacttcggggcacgtctgcnagacggtgcangnttccnnaagncaaggtatgccgtccgaagnaccctttnagggacttttacaaaagggtataaagngctgatgtagggaanttggccctgcactgacgacatccgaaggggaagtgcactgtgctcctgcaggtctatgacgctt

SEQ ID NO: 312 - DNA, 233 bp, Homo sapiens
  misc_feature (1)...(233): n = A,T,C or G
gaacaaaactggagccttcctaggnctgggagagctaaaacgcttagatctctccaacaatcggattggctgtctcacctctgagacatttcaagggctccctagacttctcagactaaacatatctggaaacatctactctagtctgcaacctggggtctttgatgagctgccagcccttagctatagtgcccacctgaatgtcaataaacagcagctgaagcaaaaaaaaa

SEQ ID NO: 313 - DNA, 232 bp, Homo sapiens
  misc_feature (1)...(232): n = A,T,C or G
actgaggaggtatttgatcatgggtcacctgngaaagcnanggcanatccactaaccngannctacntatgaggaanaactgnaanctgnnctggctncttgattngagtatttattaangcagacagagcctgttcgcacatttcattcagcctgctgctcagaagactccaacctcacccttgaagatgaaaccagggccgcccacgggtaaaaaaggataaaaaaaaaa

SEQ ID NO: 314 - DNA, 215 bp, Homo sapiens
  misc_feature (1)...(215): n = A,T,C or G
tgctggagtacgccgtttccaccagtgctaagttngcagcagangatttaaagttcctgcagctacaagtgcgattattactaatgatgggaatangaataaatcctgcacangactgntgggaatgttttcctggaagcgnggntnaatanctganaattattnntagnagaaccnnnggtgtgaagctggtnatatntgcgtgggtgggaaca

SEQ ID NO: 315 - DNA, 203 bp, Homo sapiens
  misc_feature (1)...(203): n = A,T,C or G
tgcggccccagcaggagcccggcctcatctctggagtccatgcgggaattgcatgctgaactccaaggggacnactggagggtcancctggaggatcacagcagccaagggactttggncaaanaatgnccgacttnnaanaggccacagactggagttgagtgangggngacctttntgacctttggcccccaaaggtcaag

SEQ ID NO: 316 - DNA, 178 bp, Homo sapiens
tgagatctgtttcccctcatctttccctcagagccagcccaggcttctgggccttatgtggagatcatcgaacagccgaagcaacggggcatgcgattccgctataaatgcgaggggcgctcagcgggcagtattcctggcgagagaagcacagataccaccaagacacaaaaaaaaa

SEQ ID NO: 317 - DNA, 176 bp, Homo sapiens
  misc_feature (1)...(176): n = A,T,C or G
ctgcccaccctccagactgggcgccatngntccaaggctgtgacccgccactggcgagnnatgcacttgcagcggcagaagctgagaggcgtataacgtgannatatctcctcgccaacactctgccatcanccacgagatgcctgcntcctnctcncaagccccccaaggaggag

SEQ ID NO: 318 - DNA, 169 bp, Homo sapiens
  misc_feature (1)...(169): n = A,T,C or G
gttgcgcctctccgctgcagtcaaaactcctcattggctaaaatgccccaaacaggngcctgcatgtccaatggcttccatggcatactccacttggtataancgacctacaaaacagtgagtcaccacggttcctntcgctcttgcaccactcatctgagaaaaatca

SEQ ID NO: 319 - DNA, 133 bp, Homo sapiens
  misc_feature (1)...(133): n = A,T,C or G
acgtctactctaaggaccanntgcagacnttctctgnggagcatcctgntcttctaacggaggccccactganccccagtaagaaccgggagaaggnggnagaggtcttctttgaaaccttcaatgctcctgc

SEQ ID NO: 320 - DNA, 130 bp, Homo sapiens
gctagaagaaagccaaggtaattgcagtaatgaatgctgtggaagagaaccaggcctctggagagtctcagaaggtggaggaggccagccctcctgctgtgcagcatcccacgggtgcctgatgatgcaa

SEQ ID NO: 321 - DNA, 130 bp, Homo sapiens
  misc_feature (1)...(130): n = A,T,C or G
gcgcaagtcctgtcaggcctgccgactcatgaaangcctnaaagtggggatgctgaaggaaggngagcgccttgaccgnnttcgaggaggccgcctgnaagtacangcgacngctggattcggtataaca

SEQ ID NO: 322 - DNA, 123 bp, Homo sapiens
  misc_feature (1)...(123): n = A,T,C or G
agctcactaccctgctggaagcagngggaaaaggaccatggnagtggncagcgatatggcaccaaatccttaccanaatgtctgaattatnttgaaaaagaaaccgaagaatatcttaaagga

SEQ ID NO: 323 - DNA, 113 bp, Homo sapiens
gaggactggacggcagccctgctgaacaggggccgcagtcggcagcccctggtgctaggggataactgttttgctgatttagttcacaattggatggagttgcctgaagcaga

SEQ ID NO: 324 - DNA, 109 bp, Homo sapiens
actgaggggatgatgagcaatctatacaaatggctgcaagttgggaagatgaaaaagtgacacaagcatcatcaaacaactttgttgctattaaaattgatactaaaag

SEQ ID NO: 325 - DNA, 407 bp, Homo sapiens
tgaggacaatgcccaaagaacaagttattcaaagggtacatataactggagatgcagcttcgatgatttgacagatgcaaactgccaaatttgcagaggaatctgcaatacagcctaaagtcaatcttctgccaatgaccaagctttggaagaaacagcaacaagaaggtgaagcttgtctaactttgggaccttgaaccgaggacctgtcgtgataggagtcctttcccagagttacattaatcgcttctgagaactgtattgtttttctctaggcttgcatttagccccatgttaaaacaccttctcaaactccaaaacattttcttaggtcctcacaactaaagcttcagtattctcagaccattcaataaatttgcaccgttttaaaaatccaaaaaaaaaaa

SEQ ID NO: 326 - DNA, 415 bp, Homo sapiens
  misc_feature (1)...(415): n = A,T,C or G
tgaggattggcaacctccatttgcctgtgaagtaaaaaccttccgtttcactcctagagtccagcgcctgaatgaacttgaggcaatgactagagtaagattggacttcttggatcaactggcaaaattttgggaacttcaaggatctacattgaagatccctgtggtggagagaaaaatcctggatttgtatgctttaagcaagattgttgccagcaaaggaggttttgaaatagtcaccaaagagaagaaatggtctaaagtgggtagccgcttgggatatctgccaggaaaaggaactgggtctnttttgaagtcacacctatgaaagaattctctacccatatgaacttttccaatctggtgtcagccttatggtgagatgcatcacagttctttttttttttttttttgg

SEQ ID NO: 327 - DNA, 502 bp, Homo sapiens
  misc_feature (1)...(502): n = A,T,C or G
gactgaggtctccaagncgacatanttccacatctccctccccttctcgactgaaagaaagaagagatgaggaaaagaaagaaactaaagaaataaagaacaaagaaccggcagatcacctgaggaagacctggagggtaaaacagaggaagaaatagaaatgatgaaattaatgggatttgcctcttttgactccacaaaagggaagaaggtagacggctctgtaaatgcctatgccatcaacgtgtctcaaaagaggaagtacaggcagtacatgaatcgaaaaggcggattcaacagacctctggattttattgcatgaaacttgaggtgttggatggaggatttcccccaccctcgtctgggtcagagagtattttatattttatatttaatacacatcaaaacaggatcttgattcttccttcttataaagtaagaaagtcttatttatgacacccagtttacttacttttcaaggcaatgtccctgggatggccac

SEQ ID NO: 328 - DNA, 489 bp, Homo sapiens
  misc_feature (1)...(489): n = A,T,C or G
gaactgagcattttttgtcctcaagaaaatactgaagaggcgttgctgttactgctcattagtgaatctatggccaacagagatgctgtgctgagcagaattcctggaacacaagagtgaccgcctcatcagtctgcaaagcgcagtctgtggtctatgatctactgaccattgcccttggaagacgaggccagtatgagatgctgtcagagggccttacaaagancnatgaaatgttgncttcgaagaggnccancgtntgntnccaanttgctctgtcgctgatggctgctgggaagtccgcccgtgctgtgaaggtgctgaaggaatgcatccggctaaagccggacgacgccaccatcccgctcttggcagccaagctctgtgtgggttccctccactggttggaagaggctgagaagtttgccaaaactgttgttgatgtgggagagaaaacatcagaattcaaggccaaaggctacctagctc

SEQ ID NO: 329 - DNA, 476 bp, Homo sapiens
  misc_feature (1)...(476): n = A,T,C or G
aactgagtcccctgcatgaaaaattatttaaacgccgcacaccaatcttccgtgagagaagaaaaggaaattccgtgcgtgggtctcagcaggagtgcagctgatgcagcttaaaataatgccgaagaagaagcacttatctgcaggcggagtgcccctgattctcttcctgtgccagatgatcagcgcgctggatgttcctctcgatccacctggtgttaatgaanacactgtaaaaaaggatggaaangnctggacctgcngacggacccctcttcttcattatctttctttgcctcaggtgtcttttatgtgcannggcggnagtggcctcagaaggaactggctcaaccatcctgagcttcccagnnggtggatcctgtgaaccactttnaaaggatgatgcagacacccccaccccaccccgcttattgtccctctcatgttgtactttcttccttcattgctaaagcatc

SEQ ID NO: 330 - DNA, 457 bp, Homo sapiens
  misc_feature (1)...(457): n = A,T,C or G
actgaggttctgtcatgtagcgactcccacacctttaagaaacaacctctgcatcaatatgcacggagaccacttttcccgctgcgcgcacccttgtgtaacacagtacgattcatgtttattcaaacacaagacaccccaaatcccaacagccttaaagtttataccaggaaagccggttcttgagacgaggaccatggatttccccacccctgctgcagctttccgctcccctctggccaggcagttattcagaattgaaggtgtgaaaagcgtcttcttcggaccagatttcatcacagtcacaaaggagaatgaagagttagactggaatttactgaaaccagacatttatgccacaattatggacttctttgcatctggcttacccctagtgaccgnggnagacgcctccgcctncggngagaagcaggcctctggaggaagatgacgaaag

SEQ ID NO: 331 - DNA, 281 bp, Homo sapiens
gggccgcctttaatttcaaaaaatcaggtagcagtccaaaatggactcatgacaaataccaaggagatgggattgttgaagatgacgaagagaccatggaaaataatgaagagaagaaggacagacgcaaagaagaaaaggaatagtctcaagattgcaacagggagcagaacttgacacttacatttttttaaacctgatttttgttttcaaataagaatgtaagcattttacttaaactgtactgtttgcaagtagtctatagaaattttgttttaaga

SEQ ID NO: 332 - DNA, 518 bp, Homo sapiens
gaactgagatgagcaataacagcaataagagagctccaacaacagcaacacaaaggttgaagcaggactaccttcgaattaagaaagacccagtgccttacatctgtgcagagcccctcccttcaaatattcttgaatggcattatgttgtccgaggccctgagatgactccttatgaaggtggctattatcatggaaaactaatttttcccagagaatttccatttaagcctcctagtatttacatgataacccccaatggaagatttaagtgcaacacaaggctgtgtctctccatcacagatttccacccagatacatggaatccagcgtggtccgtctccaccattctaacagggctcctgagctttatggtggagaaaggccccaccctggggagcatagagacgtcggacttcacgaaaaaacagctggcagcacagagtctagtgtttaatttaaaagataaagtcttttgtgaattatttcctgaagttgtggaggaaattaaacagaaa

SEQ ID NO: 333 - DNA, 506 bp, Homo sapiens
  misc_feature (1)...(506): n = A,T,C or G
gactgagttttgagtattcggggngcccaagagaggagcccacagacccccagctcatgcgactggacaacatgctgctagcagaaggggtggcggggcctgagaagggcggaggctcggcagcggcggctgcggcagcggcagcttctgggggtgcaggttcagacaactcagtggagcattccgactacagagccaaactctcacagatcagacaaatctaccacacagagctggagaagtatgagcaggcatgcaatgaattcaccacccacgtgatgaacctccttcgagagcaaagccggaccaggcccatctctccgaaggagatcgagcggatggtgagcatcatccaccgcaagttcagctccatccagatgcagctgaaacagagcacatgcgaggccgtcatgatcctgcgctcccggttcctggatgcgaggcggaagagacggaatttcaacaagcaagccacagaaattctgaatgaatatttctattcccag

SEQ ID NO: 334 - DNA, 499 bp, Homo sapiens
  misc_feature (1)...(499): n = A,T,C or G
gactgaggtggggtctttaatctgatgagaagagtggcccgtggtgaggaagtggcaggaggacctgtctccagcactcggtcaccctccaaccctgcctaggactttctgatggacttgcattcagagactgatgcccctctgctaacccggattcaaaaggtgaatgcttgtctgcacagtctgattcacaaggngatgcnaaangatggnannggaactgaccactcccacttgaagaggngnanancnangctnnnncaggngcnntggagcntacnntgnannctncannatatgntgccctgctgcatngtctntgccctgagaacngctctgcttttggactaaacattcagcttccttattactaaagctaaagcanctgccctggaacttanagtgaaaactgcaccatctggtgccctgtgtgctgctctgtgccctgtgtcctgctctgcttctggaataaacagcagcttccttattaaaaaaaaaa

SEQ ID NO: 335 - DNA, 507 bp, Homo sapiens
  misc_feature (1)...(507): n = A,T,C or G
gactgagcttggagtcaaaatccgggcccctcatgcactggtgatgacctttctcttcaggagcggcagncncacagagaangttnaggccatnatgaaagcnacgtncatccacctctngnaacctagcctgcgtttgngtntgnctataagagnatccatgccctacagtnccatgtgcaaggngagacccaccagatgcactctntcctgnatgncttaatcggggggctcctgctgtttggagagaacaatancattantagcnagannaacatgnacctganctcacgccgtcctgtncgccttgtgccgcctgggtgtggagaaggnctatatccctgngctcaagtgggacccgttccccttgcacactgcggngatttgggggctcgtgctgtggctttttgagtaccaccggcccactctgcagccctccctacagtcctccatgacctacctctacgaggacagcaacgtgtggcacgacctctcagacttcctcat

SEQ ID NO: 336 - DNA, 509 bp, Homo sapiens
actgagggctactgggcaccgccaccatgagcgaggcatttgactgtgcaaaatgcaacgagtccttgtacggccgcaaatacatccagacagacagtggcccctactgcgttccgtgctatgacaacaccttcgccaacacctgtgctgagtgccagcagcgtcattgggcatgattcaagggaacgtgttctatgaggaccgccacttccacgagggctgcttccgctgctgccgatgccagcgctcccttgccgatgagcccttcacctgtcaggacagtgagcttctgtgtaatgagtgttactgcacagccttctcgtcccagtgttctgcctgcggggagactgtcatgcctgggtcccggaagctggagtatggaggccagacgtggcatgaacactgctttctgtgcagtggctgtgagcagccgctgggctcccgctccttcgtgcctgacaagggtgcccactactgcgtgccttgctatgagaacaaatttgctcctc

SEQ ID NO: 337 - DNA, 336 bp, Homo sapiens
gactgagacccaaactccagctagtaaaatcagcttttacgggagaaaactcacggccttgtggttgagaaccaggagttaagaacacgcttgggaatggacacgctggatcctgacgaggttccagaggtggaggccaagggagaagcaagccagaaactgaaaactcaactgaggaggagttcagctgtagaaagagccgccacactcaccggatggatagcttactgctctgcagcgctgaaggacttgcgaaagccctcattacacgtcctgccatgctgaagagctcttcctgagaaattaaaaactttaaccctggttatttccaaagaa

SEQ ID NO: 338 - DNA, 321 bp, Homo sapiens
  misc_feature (1)...(321): n = A,T,C or G
tggaatgaaaggggacaccgtgaatgtacggcggagtgtccgggtgaaaaccaagaatccacctcattgcctggagatcacaccaccatcttcatgaaaagctggtctcgggngatgcnatnaacntgacctttctacanaanacgactattcaggtcactgnnaaatgaaccgttacagataagaagattgactagnctaangaacgcggnnggttgtnnnanatntganggcaagatgcagaaaggtgancgccnaatggccanaaggttnctggngganaggaaggaanagctggaggagggggcacaccagcttgcc

SEQ ID NO: 339 - DNA, 319 bp, Homo sapiens
gaactgagtgagcaaaccaacatgtcagagtgggagtcctactacctacactgaaggacatatgcaaggctcatgggcttaagagtgggccgaagaagcaggaactgctagatgctcttatcagacacttggagaagaactgactaaagctcagaagcccagccactttctacactgcagccaggccacctgcttgtgttcttaccaagctaggtggtagctacaaagagctacttaagtgcaaaatcatggagattacagtctcccacctcactgtgccttactctgtgaataaagagctctaactttaaaaaaaaaa

SEQ ID NO: 340 - DNA, 314 bp, Homo sapiens
  misc_feature (1)...(314): n = A,T,C or G
gactgaggtcgtgagatgcaatctgatggcaatagaatgacatcattcagatatggtccggaaaaagaacccccctctgagaaacgttgctagtgaaggcgagggtcaaaccctggagccaacagctacagagagcaaggtatcatgggaagaacaaagaattgtctgcagatcagatgtcagaaaatacagatcagagtgatgttgcatagttgaactcgaaggaggaacacaggccgcgcttcnccaccccgaggcccaacaccttcttctacacacagagacccnctgtgtaatgacttgcgactgtcttt

SEQ ID NO: 341 - DNA, 290 bp, Homo sapiens
  misc_feature (1)...(290): n = A,T,C or G
gaactgagtattcctggaaacttgtacatccaacagacaagtactccaacaaggactgccccgacaacgctgaggagtacgagcgagccacactgctacaactacaccactgaggagaagtttgccctggtggaggtgattgccatgatcaaaggcctgcaggtgctgatgggcaggatggagagtgtgttcaatcacgccatcagacacacnggtttacgctgcgcttcaggacttctcccaggtgaccctcagggaaccacttcgacaggccatcaagaagaaaaaaa

SEQ ID NO: 342 - DNA, 286 bp, Homo sapiens
aactgaggtacatggtgccgggtccgagccgtggtgatggcccgagatgactccagtgggggctggctgcctgtggggggcgggggcctcagccagaccaccttggagtgtaccctgaggccaggtttggtttacaacaaagtgaatcccatcttccaccattggagcttgggggactgcaagtttgggctgacgtttcagagtcctgcagaagcggatgagttccagaagagcctgctggctgcgctggctgccctgagtcgaggttcgctgactaaaaaaaaaa

SEQ ID NO: 343 - DNA, 285 bp, Homo sapiens
  misc_feature (1)...(285): n = A,T,C or G
tgtcacttgtggtgctngattttgngcaggacccatgctttgcccaaggagatggtctcattaagctttatgaaaacttcatcagaagagtttgagcacaggntaaaccctctgtccctggcagaaataantctccatgtggttagacagangnccgatcctaanggggnctctctacttttntggaatagacattgngagcanggtaaaangnactgatagaagcccgggancttgaagtaaancacngcaatcagntanctnttaaaatttaatacattcggc

SEQ ID NO: 344 - DNA, 259 bp, Homo sapiens
  misc_feature (1)...(259): n = A,T,C or G
actgaggagagtcaccgtcatcaccctgtgaagaaagggcctcggctcctgcatgcagctctgcctaataccttgacatctgtccccgcgtctcattgggtccctagtcctgccggtagctccaggcctctacgaacacggctggnaacgttactgtgcctgntaccacaattcaaaaatctacagacaggncaantgtggatgagaacgtaacactgctcgtgtaaaataaagttgcagaactgccaaataaaaaaaa

SEQ ID NO: 345 - DNA, 247 bp, Homo sapiens
  misc_feature (1)...(247): n = A,T,C or G
tctttattacactttttttnaagcnaaagaagggcacangttgccnnttccaggctataattgaagcagctcccaaggcctgcttcanatttgtgatttttggaaaatcatgtattgctttctcanaagagaaatattctatagtaatgtattttaaagccttgtattttaaatggttttacctttctttctttctttgcaccttcatttatcccacttaagactgaaagaacaagttcaaaactca

SEQ ID NO: 346 - DNA, 236 bp, Homo sapiens
  misc_feature (1)...(236): n = A,T,C or G
gagcctcatctctctttgatgctgagagaagaaccagggnctgatgacttcttaccacagnatgagctcctcanccaaggtctgcanagtctcctncttagggtaatggtctgactccaagtgctttcttancttctgcaactgcaaatgggtcaacttaaaggttcttctatcctttaagtacaganaatgaattgtcttcatctcaggttcttctatcatggcgggtgctcact

SEQ ID NO: 347 - DNA, 228 bp, Homo sapiens
  misc_feature (1)...(228): n = A,T,C or G
gactgagagctggaaagaacttggaaaaattcagcatgtcttccatgcaaacatgacagaggatggagatggagctcaggggaagcgcctcatagaaatccatgatcctgcagggggaaataaaaaagatgataatgcagngcatgggtacattntttgacatcaacattcctntcctacantgcttgtgaaaatntaaaatgttgtagaaatttttaaaaaaaaaaa

SEQ ID NO: 348 - DNA, 227 bp, Homo sapiens
  misc_feature (1)...(227): n = A,T,C or G
gactgaggaccggagtaggccctatgacacttttaacttgcactccttggagaactccttaatggatatgataaggactgaccatgagcctctgaaaggacaccacgtacacctacnagtcnnccnnccangnacaganaactgttatgnngcattancgagtcattcttctntatttncnttanaanacgccnnccangcatganacatcatggcagatcaggcac

SEQ ID NO: 349 - DNA, 221 bp, Homo sapiens
  misc_feature (1)...(221): n = A,T,C or G
cgccggttcctgtttncacatctcncctcccagccttcccagaggctgtgaagccaggggctgtggctacttctagaanaaacctcaaggatgaacaggagaaagtccggcctgtgaagccacgttcccttctagacacagggcccatcatggctggggcccagcggcagcgtccgtgcgagatggatgccccttgttccctgtctcgaaaaaacattttt

SEQ ID NO: 350 - DNA, 214 bp, Homo sapiens
gaactgagtacatacaagcagaaccgccaaccaacaagtctctgtccagcctggtggtgcagttgctccagtttcaggaagaggtttttggcaaacatgtcagcaacgcaccgcttactaaactgccgatcaaatgtttcctagatttcaaagcaggaggatccctctgccatattcttgcagctgcctacaaattcaagagtgaccagggatg

SEQ ID NO: 351 - DNA, 201 bp, Homo sapiens
  misc_feature (1)...(201): n = A,T,C or G
ttgtttcaggtgccaacacnnaccctggttctgcaggactggnaatctcaggagcgtgcatccaggngtgnggcngtgagctgggcccgcacaacagatggggcattgaagaggnctgacattggaggctgggcccatgtggtgngcgccctctacatcccggaggtgcagntcgccaacgtgctcacagatggagcccat

SEQ ID NO: 352 - DNA, 201 bp, Homo sapiens
  misc_feature (1)...(201): n = A,T,C or G
gctcactgagcgtgacagcagccaagggacncatagctgccatatgtgaaggaccnaccnctctgtngtctcatgaagnagtnttttngatncanggaccnnnctnacccantgnactanttnacacaaatgttganctggcatancactacagctactcanagagccgcgtggagaaggacggcctgatcctcaccagcc

SEQ ID NO: 353 - DNA, 201 bp, Homo sapiens
tttgtccttgtggtgcagtaggttcggtgcttgctctcaggaacaccacagacagcaaatatcccatctacaacccgacggtcatttacctgtcaactcaatataattaacctatgtcctggcaatcaatgccctttccctcaaaacaatggccatctctaaatttcttgactcattaaatcaatactaagacaaaaaaaa

SEQ ID NO: 354 - DNA, 199 bp, Homo sapiens
  misc_feature (1)...(199): n = A,T,C or G
ttgggaataacgtttcttggaatcggactgtgggcgtggaatgaaaaaggtgtcctctccaacatctcgnccatcaccgacctcggtggctttgacccagtgtggcttttccttgtggtgggaggagtgatgttcattctggggtttgcagggtgcatcggagcacttcgggaaaacacctttcttctcaagtttactg

SEQ ID NO: 355 - DNA, 198 bp, Homo sapiens
tttctgagcaccgctccttcaggttggacgttacgaaacttcagcacaggtaccagcaactgcagcggcttgtccacccagatttcttcagccaaaagtctcagactgaaaaacacttctcggacaagcactccaccctggtgaatgatgcctataagactcttcaggctcccctgaccagaggactatatcttgtaa

SEQ ID NO: 356 - DNA, 187 bp, Homo sapiens
  misc_feature (1)...(187): n = A,T,C or G
gactgagaggacttccacccggcggcntccgcgaccggcaccgcgggccgcatgcgctgcgtcatctgccaccgcggcttcaactcgcgcagcaacctgcgctcgcacatgcgtatccacacgctggacaagcccttcgtgtgccgcttctgcaaccgccgcttcagccagtcgtcaaaaaaaaaaa

SEQ ID NO: 357 - DNA, 181 bp, Homo sapiens
  misc_feature (1)...(181): n = A,T,C or G
attatgtagttgggtgctgtttgaccggtntggccgccactttggcacaattctcaactacctgcgggacgggtcggtgccactgcctgagagtgccagagaactcggggagctgctaggtgaagcccgatactacctggtccagggcctgattgaagactgtcagctggcgctgcaggga

SEQ ID NO: 358 - DNA, 180 bp, Homo sapiens
  misc_feature (1)...(180): n = A,T,C or G
acgtacatgccctcgnncgtgatggcaaacaagatctctccgcnccgcccgcgttctttgttgtggccccacacgcacttctgagcgtaggccttggcnaaggcggccagctcgtcatcccacctctgcagggacncaantggaggcaagacagggaggtgagactcctgcgaagggcag

SEQ ID NO: 359 - DNA, 172 bp, Homo sapiens
  misc_feature (1)...(172): n = A,T,C or G
caaggcttttttgaccggtgtagaccctattctgggccaccagctctcagctcgtgaacatgctcgatgtggtcttctcttgcnccgttctttgccacctgctcgggctgctgtgttggaccacttgagaggtgtttttgatgagagtgtccgggcccacctagctgcccta

SEQ ID NO: 360 - DNA, 141 bp, Homo sapiens
  misc_feature (1)...(141): n = A,T,C or G
gactgagggaacagaatgctttgngtgtctccattctgganaggctgctccaagctggggagccgattcactnggccaggaacctcaggcttgacctgcanaggggactgactcaccctgatgactctgtaaaaaccctca

SEQ ID NO: 361 - DNA, 109 bp, Homo sapiens
  misc_feature (1)...(109): n = A,T,C or G
gactgagagctgaagcgctgcagcatggcgcgcggctgcctccagggcgtcaagtacctcatgttcgccttcaacctgctcttctgggncattggcatgaggcagcacc

SEQ ID NO: 362 - DNA, 108 bp, Homo sapiens
  misc_feature (1)...(108): n = A,T,C or G
gactgaggaaacgagtttatgaaagctacttgtgttccttactgttccctgcagagtgtcaaaggtctgcttctgcactgcggnccttcaatgtggaactggctcagg

SEQ ID NO: 363 - DNA, 407 bp, Homo sapiens
tggcaggaacctcgctgcagatagggtatatatgggaagaacagaatgttgaagatgactgcaaaaattttggaagaattcaaaggcatgtcatatctgattctgaatacttactggatgagcaggagggatatggaaacaagccatacgattctagttctctcacaagtattcaaggacacatgggagcgcacactgtgaatggaccttgtgaatgtgagaactcacacaggagagaagccctatgaatgccagcagtgtgggaaagccttcacgcgtcacacttcccttcggttacatgagataactcacactggagagaaaccttacaaatgtaaagaatgtgggaaagccttcagacatcattcttctcttcgattgcatggaagaaatcatagtggagagaa

SEQ ID NO: 364 - DNA, 547 bp, Homo sapiens
actgaggagacacacaggatctataagcagaagctggaggagctgacctccctgcagacgctgtgcagcacctccatcagcaagcagaagaggcacctgaaggacctgaagcacacactccagaggtacaagcgccattccagccatgaggaggcggcgctcatccaacagatgaccgccaacattaaggagccgacagaatgtcttctttgacatggaggcctacctaccgaagaagaatgggctctacttgaatctggttcttggcaacgtgagcgtgaccctcctcagcaatcaggccaagtttgcttacaaggatgagtatgagaagtttaagctctacctgaccataattcttcttctgggtgctgtggcgtgtcgatttgtccttcattacagggtgaccgatgaagtcttcaacttcctgctcgtgtggtattactgcaccttgaccattcgagagagcatcctcatcagcaatgggttccagaatcaagggctggtgggtgtctcaccattatgtctccacgttcctgtctggagtgat

SEQ ID NO: 365 - DNA, 535 bp, Homo sapiens
gactgagcaatccagcagcaacttcattgttgtcatacacccaggttcaacaactctaagacttggccgagccacagatacacttccggtcagtgttcctcacgtcattgcacgaagacacaaacaacaagggcagcccctgtacaaggacaacttggctcctaagggaaggactaaataaacctgaaagtaatgaacaaagacaaaatggccttaaaatggtggaccaggcaatatggtctaaaaagatgtcaaacggtacaaggcggatccctgtgtcaccagaacagacacgctcctacaacaagcagatgcgacctgccattctagatcactgttctggaaacaaatggacaaacacatctcagcagcctgagtatttggtaggagaagaggccttgtatgttaaccccctggactgttacaacattcactggcctatcagaaggggtcagctgaacatccacccaggccccggaggctccctcacagctgttctggcagacattgaagtgatctggtctcatgcaaaacc

SEQ ID NO: 366 - DNA, 531 bp, Homo sapiens
  misc_feature (1)...(531): n = A,T,C or G
gactgagagcactggcaatgacattgntgatgctttgatgatatgaatttaaaggagtcccttcttcgaggcatnatatgcatanggatttgagaagcctnnagctnttcagcnaagagctattatcccttggattaaagggtnctgatgtgattgctcaagctcantcaggtactggcaagacagccacattngctatttccatcctgcaacagcatggagattgagntcaaggagacccangcactagtatnggcccccaccagagaactggctcaacagatccaaaaggtaattttggctcttggagattatatgggagcaacattgtcatgcttgcattggaggaacaantgttcnaaatgaaatgcanaagtngcaggctgaagcccctcacattgttggtggtactccagggagagtgtttgatatgctaaacagaagatacctttgttgngttgctttctgccacaatgccaactgatgtgctagangtgaccangaaattcatgagagatccaattcgaattc

SEQ ID NO: 367 - DNA, 531 bp, Homo sapiens
  misc_feature (1)...(531): n = A,T,C or G
actgaggttgaattttctcggagaaagaaggccggccatcaggaaaacaaacaagcctcagcaacatctaaacccttgaaaggatcctgagaggggggaaagggaaatcagccaccagcccaaccactcgtgtcttctgcccctccccacctatcttgcccaccccaccagcccacgctgcttgggactttgagatctgtggccgaaggaccgtcaccacataacttcaaaaataatcaaccaccttccctgcccaaacctacccaatctcactcatccagcatttccgttttggaatccactcagactttttttttcaacgaccccctctccctaaatggagttgggcgggggggaaatgaaaactgagttggtctttactttttttaaaagagactttttgatccaatgaggccccacaagtaactgagtttggggtcctggntggttgctttattttttttcctccaaaattttacccctnccccctgagcccgaggtgctgacgtcgcaaaaaaattgggatctgcg

SEQ ID NO: 368 - DNA, 526 bp, Homo sapiens
  misc_feature (1)...(526): n = A,T,C or G
gactgaggttctccagaccgcccatgggaagaatcatatgaagaggcggtgatcaaagtcagcgagcaggagtggacatgtttgggttcccaacagctaccctgctggactgtcatggaagatacgcccagaatgtagcctttttcaatgtgatgacagaagcccacaagtatgatccttcagaggccacaggatcctcaagctgggatttccagagctctttcagaagagagaagctggancaaaagtccccggagtctaaggccctccaggaagactcacctggagtgaggcagaaggtctatgattgccaggaatgtgggaagtctttccggcagaaagggagcctaacgctgcacgagagaatccacactggtcagaagcccttttgagtgcacccagtgtgggaaaagcttcagggccaagggcaacctgggtacacatcagcggatccacacagggaganaagcccctatcantgccaaagagtgtgggaaaagctttagtcagcgaggcagcctggctg

SEQ ID NO: 369 - DNA, 526 bp, Homo sapiens; identical to SEQ ID NO: 21
  misc_feature (1)...(526): n = A,T,C or G

SEQ ID NO: 370 - DNA, 521 bp, Homo sapiens
  misc_feature (1)...(521): n = A,T,C or G
actgaggctggagattaaggctctgtgggccaaanncaacacctacatcangacaccngngcnaggtgangagccagtgttcatggngactggnaggcggtaagacgtggcacacagnccaggcgnnagatnntntcatgnanntgancactnntncatgataagagctctcaccgcaacntngatntggggccgcctttggctgtggccccgtgctctgncnggccaagtgaccatccgtgtacgagtaccctaccgcgtggtgggactggtggtgggccccaagggagcgaccatcaaacgcatccagcagcagaccaacacgtacatcatcactcccagccgggaccgcgaccccgtgtttgagataaccggcgcaccgggcaacgtggagcgtgcgcgggaggagatcgagacgcacatcgctgtgcgcaccggcaagattcttgaatacaacagcgacggcgacttcctggctggcagccctgacgctgccttggacagccgctactcagacgcct

SEQ ID NO: 371 - DNA, 520 bp, Homo sapiens
  misc_feature (1)...(520): n = A,T,C or G
gactgagagagcttgattctttgctctcagactacgacatcctctccttagctaatattcagcagcactccataaggaaaagggatctacagtctgcgacacacttagaaacattactaactttttcagcttttgaaaaggcattttaaattatacttgacatcaagtaccgaacgcttttcacaaaacttgagagtcgtggtggtggacngggaaagaagaaagcgagtacagcgtgaagtggcaggacttcttcagtggtcacgtggttggtgagcctgactctagggttctagcccacataggagatgatgatgttacagtgagaatcaacacagatggggcagaatataacgtagagccactttggaggtttgtcaatgatactaaagataaacgaatgctggtgtataagtctgaagatatcaaggatttttcacgtttgcagtctccaaaagtatgtggttatttaaatgcagatagtgaagagctgcttccaaaagggctcatagacagagaa

SEQ ID NO: 372 - DNA, 518 bp, Homo sapiens
  misc_feature (1)...(518): n = A,T,C or G
aggacgtgatcctgcgncgacngttctggaggancgttacgantgccnnggagcagcttgctcgnnccatgcatgcgangccttgcngcaancacgttnngngaanganntncctcnntcctcngntcaacgtgaganaaggcacggaacctcagttaccccntccttctngantnataangaagagtctncgctgnataagaaccgnagcctcagctntgcagcaacaagcangatccctggagtgggntcaggctcaacccccacagccacgtccagaagtcgagacaccttttttgattctaagataccaaaggatgacctggacttccgcttagcaaccttgtataaccaccacactggggcattcaagaacaaaactgagatattgntacaccaggagaccattgaggatatccagggaaccaagatccagtttcctggagaatgtttccacgctccttcagcccccattacttcccggaccaccatcaggcactggatcaaccctaagaaag

SEQ ID NO: 373 - DNA, 516 bp, Homo sapiens
  misc_feature (1)...(516): n = A,T,C or G
gactgaggtaccagaattgctttntttgnggctcttatgaaggtctgagtccggnttctaagggacttcantgaatncnnattgaaaggaccagncngctttgaatggggtcatncgcctgctttttactacaaacaccnaccccgcttttctgcgnnatgccttnntccaaaagtcanccctcatctgacatatccgcaccacnncnnccatacntannaatctatctccggtcgacagctgngcnggnacaaccccgnggaaggttcttttgcatcatnatgtcgccngaggaggtgntggctggncntncnngnncntngcggaaaacaatatatgattnagtttcttctgggggccctcagtcctattctcttcgacatcactaaactgactccagctgtatcctttctgggaaagcttgtaggagagaaagtcgaccaccagctcccggttgctctgagacatttttataatagagatgggctcaaccagtccattgtccaaaaaaaaaaa

SEQ ID NO: 374 - DNA, 513 bp, Homo sapiens
actgaggacttgagacgtggctgaggtatatggaggcaaccagggcaaccaccacagctacaaccttgttaaagtactccaaacggtgtctccactatgggcttccttccttcctgagctgctctccctgcttgctccttgccttgccccaaggcctgggaagaaggggttggttccctgccatccttcctgccccgactcaccattagcccttccacgatcccgaagttttcatgaataaccttggcgagaggagccaggcagttggtggtacaggatgcattgctgaaacggccatagcatgccagatgagtggcagagccaccccttctccactactcttactttaccaggttgagagtacttcggcaattcctgcaatagaactggagtttggcatgacccctccgacctacagtcctgccttcagccttcctccaaacacgctgtcacacctcatcttcagcaagttaaaagggaagctgagagtgtcttgcctgagaaggagccaga

SEQ ID NO: 375 - DNA, 510 bp, Homo sapiens
  misc_feature (1)...(510): n = A,T,C or G
gaggggtggcactgaatcaacaagacaagcaactcagttgatcaatgctttgatcaaggatccagacaaagaaattgatgaacttattccaaagaatctgtttgaaaagctccacagcaaattccaaaatcgggtcctcagcacctaccaccacagctctcagtcagcatatattgtttatttttaaagatttcagcatattttatattggatgatattgattcttaacattggcccttcctggtcagcaagagtcaacatgcagntttcccttttcaagcatctatgtcttanttngaaaggctcctctctctgtagttgttggtagaaatgaaaaggatgaacagctaacttgggccaactcaaaaaggagtgttcgggttcctttttaaaatgaatacacggattataaattaaagnctccatttaacttgtttatatgtgattcagggccacactaaactactcagtgggaattatatattccaaccacttgaaacaataatctaa

SEQ ID NO: 376 - DNA, 510 bp, Homo sapiens
gactgagacaatgctaaagtggctgtcctgggagcttctgggggcattgggcaacccctttcactcctgctgaagaacagccccctagtgagccgcctgaccctctacgatatcgctcacacacctggtgtggcagcagatctgagtcacattgagaccagagcaaatgtgaaaggctaccttggaccggagcagttgccagattgcctcaaaggttgtgatgtggtggtcatcccagccggagtgcccaggaaaccaggaatgacacgggatgacctgttcaacaccaacgctaccattgtggccaccctgacggctgcctgtgcccagcactgtcctgaagccatggtttgcatcattgccaacccagtgaactccaccatccccatcacagcagaagttttcaagaagcacggtgtgtacaaccctaacaagatcttcggtgtgacaacccttgacatcgtcagagcgaacacgtttgtggcagagctaaagggtttggatccagca

SEQ ID NO: 377 - DNA, 151 bp, Homo sapiens
agcacacacttctggtccccacatcaaggtaaacggaggaggatctggagttcaaggtcatccccagctgtatactgacttcaaggccagcctgagctacatgaggccctgtcaaaaaagagagaatatccaatagaccaagcttgggatc

SEQ ID NO: 378 - DNA, 502 bp, Homo sapiens
  misc_feature (1)...(502): n = A,T,C or G
gaactgaggtggggtctttcatggtgaccttctgncttggaggccgggaaccatggtgtggggcagccatcgctgaagtcagcgaaacagagcctggcctgaagcaggcgacgctggaggccagagccatggccattgccacgtcggcccancttgccccgggcattgtatgacaacnctgctgagtccccccaggaactgtccttccgccgaggggatgttctacgggtacatgcagagggagggtgctggnggacttgatggttggtgcctctgctctctgcatggccagcagggtattgtccctgctaacagagtgaanctccttcctgctggcccagnacccaagcctagcctntgcccagcatctcccacccagcctggctnatcatgtnccacccnagancgtggctgtgaggagcangaggtgtntgtaataccaccaccagctcgaccctgctctgcctcgggacttccanctagatcctgctcaccctctttt

SEQ ID NO: 379 - DNA, 500 bp, Homo sapiens
  misc_feature (1)...(500): n = A,T,C or G
aactgaggattcagactcgncacactgagggaggagccactggtggagaggcagagatggacttcctgaggaatttattcacccagaccctgggcctgggttcccaaaaggagcgtnttctaaacgagctgaccctcgaaggagtgacaccgctacatgcagagccgagcgcctgnccgcanggtcatntgtttggtgggagccggaatctccacagtgccgcagggtatccctgacttccgctcccccgtgcactggnctatatgcaaacctggagaagtaccaccttccttacccagaggccatctttgagatcagntacttnaagaaacatncggancccttntttgcccttgccaaggagctctatcccgggcagttcaagccaaccatntgncactacttnatncgcctgctgaaggagaangggctgctgntgcgctgctacacgcagaacatagacacnctggaacgagtggcggggctggagccccaggacc

SEQ ID NO: 380 - DNA, 500 bp, Homo sapiens
  misc_feature (1)...(500): n = A,T,C or G
tgaggtggggtctttcacggagagggnccgggctgctgcgagctgtggcaggcggagcccaggagcccggcgaggatcgcgcttggtcgcctttcgccccggtagcggtgccatggcgcagttcgtgttcgagagcgatttgcactcactgcttcaactggacgcacccatccccaatgccccggttgcgcgctggcagcgcaaagcaaaggaagccacaggcccagccccctcgcccatgcgggccgccaacagatcacacagcgccgggcggaccccgggccgaactcctggcaaatctagttccaaggttcagaccacccctagcaaacctggaggtgaccgctttatcccccaacgcagtgcttctcaaatggaggtggccagcttcctcttaagcaaggaaaaccagccggaagacagggggacgcccaccaaaaagggagcatcagaaagcctgggtctttcaaccttgaacggttttgatgtggaggaaggaa

SEQ ID NO: 381 - DNA, 499 bp, Homo sapiens
gaactgagtggtgaagatccaagaagggaagacgactgtaattgaaggccgaatcacagaaactcccaaggcgactccagatccccctaacccctcaggccagtgccccatctgccgctggaacctgaagcacaaatatacctatgaggatgtgttgttgctcagtcagttcatccggccttatggaggcatgctgccccggcgggtcacaggcttgtgccgggaagaacaccgaaaaatcgaggagtgcgtgaagatggctcatcgagcaggtctgttaccaaatcacagaccacagcttccagaaggatgcttaccaaaggataaacccaagctcaaccgctatctgactcgctgggctcccaagtccgtcaagcccatctataaaaaaggccaccgttggaacaaggtgggtatggccgtggggtcaccactcctgaaagacaatgtctgctactccagaaggcctctgaagatgatgcattagtgggagcaggac

SEQ ID NO: 382 - DNA, 498 bp, Homo sapiens
  misc_feature (1)...(498): n = A,T,C or G
actgaggaccctggccatggaccagccccctggcctgcaggtggactacatcttccggggtgtggagcacgctgtgcgggttgtggtttctgggcaggtgctggagctggaggtggaggaccggatgacagctgaccaatggcgtggagagtttgatgccaaccttcattgaagacttgactcataagacggggaactttaaacagttcagcattttctgtaacatgctggagtcggccctcacccagagcagtgagtctgtcaccttggacctgctgctgtgacatgccgaggggacgcagttaaccnctcccggaaccgcagctcctnagtggacagtttccgcagccgctgctcgtctgtcagctcctgcagcgagctggaggatttctccccactcagtttccaaaaatcnccgctgcccggggccgagggaaaccacccagtccaacacccnggagcaggtccaaaangaaagtctaccactcaagaacgcag

SEQ ID NO: 383 - DNA, 497 bp, Homo sapiens
  misc_feature (1)...(497): n = A,T,C or G
gaggactgagagtatgaggccctggcctctgagggccactcactcgtgatcacttccaccacggcagaaccttctaagcctacctcctgccgtgtggtgatctacctgcagcgggagatgtcaggggacacctgtctgtgtccagcctcgggggccaagcccaagatcagtggcttcaagggaggcgggctgggcaacaagtaccgtgcagctcaatgtgggaggctccctgtactacaccacagtgcgggccctcacccggcacgacaccatgctcaaggccatgttcagtgggcgaatggaggtgctgactgacaaagaaggctggattctcatagaccgatgtggaaagcactttggcaccatcttgaattacctncgagatgacaccatcaccctccctcaaagccggcaagaaatccaggagttgatggctgaagcaaaatattacctcattcaagggctggtgagcacgtgccagactgccctgcaggaca

SEQ ID NO: 384 - DNA, 496 bp, Homo sapiens
  misc_feature (1)...(496): n = A,T,C or G
actgagcacctgcccaggatncctggcagctttnggggaagcagttttggaagtgtnacattaggcacagnctgcacctaccttcagaccttggataccccccatgttggccctgaggtcatctggtccaccctgtntccagccaaggtccctcacagatggaatttggtgcacgccagacatatgccgtggcctggtcttccctccacctccggatcttccctccacctncggatacctgggatgtactccctctctcatctacagggtcctacatcaacctggttgtatcagccataacctgtactttcataaagtaggngccttggaagactcacagtataccgtcaagttcagtggctcgctgcggctgacgctgacggggttccacacctcncactggtaggcgcctgcctcctccctgcggacgccatgccgggtcagcatcctgccatcgggggacatgcccaagcggacggnaactggcagagacttc

SEQ ID NO: 385 - DNA, 493 bp, Homo sapiens
  misc_feature (1)...(493): n = A,T,C or G
gaactgagccagcggggagaatctggcggagacatggtttccacaccccanactccgactcacggggccctggctaaattccagactgagattgctaccagttcccagggatctgtggaagaggatttcgggcaggggccctggctcaccatgaaatctgctctgggcctanacgagggagaccccacctgctttctctatacctacagtattgtcatggtgctacgcaaggcggccctcaagcagctccccaggaacaaggtccccaatatggcggtgatgatcaagtccctgactcggagcacaatggatgccagtgtggtgtttaaggaccccacgggagagatgcttggaacggtgcacagagtgcttctagagacacaccagagtgagctgaggcctggctcggtgctgttgctgaagcagattggagtgttttctccttccctcagaaaccactacctgaatgtgacacccaacaacctagtccaca

SEQ ID NO: 386 - DNA, 493 bp, Homo sapiens
gactgaggctgggcttcatcaccaggcctcctcccaactcctgtgtaccggataccgattacttcgaatcccagtactttgtactcagcccaggcccagaaccatgtcctcatcaacttcctgggagctgcccctggtggctgtgtgccaggtaacatcaacaccaaacaagcaagagaactttaaaacatgtgctgagttggttcaagaggctgccagactgggtgcttgcctggcctttctgcctgaggcatttgactttattgcacgaaaccctgccgagacattactcctgtccgaaccactgaatggggatcttttgggccaatatagccagcttgccagggaatgtggaatctggctgtccttgggcggtttccacgagcgtggccaagactgggagcagaatcagaaaatctacaattgtcatgtgcttttgaacagcaagggatcagtagtggccagttacaggaagacacatctgtgcgatgca

SEQ ID NO: 387 - DNA, 491 bp, Homo sapiens
tgaggctaagatactcactttctgcttgaagccgggaatgagatgtgtggaacccaggagtgtgtgtggagtagacaccaatgcgttgtgatagtgaggattttgaagatacgacagaaaaaccaggcgttttgatttctgaggtaaaagtaggctgtaaatctattttgtgaaaggagggaagactcaggccagaaatcttgtatgctatggttaactggttcccatcctccgagaatcctgttttccatggtgtaagacttactcagcatcaggataagggataacgactctatggatatacagaatccttcaccatggtaaaactcgctaacccgctgtacacggagtggattttggaggccatcaaaaaagtcaagaagcagaaacagcgaccttcagaggaaaggatctgcaatgccgtgtcctcatcccatgggctggaccgcaggactgtgctagagcagctggagctgagcgtcaaagacggg

SEQ ID NO: 388 - DNA, 490 bp, Homo sapiens
actgagatgtgacagcatgggggtggtctttgacgtgaagaccttctgccacaatttgcgggcaactaagccaccatatgagtgccctgtggagacttgccgcaaggtttacaagagttacagtggtatctgagtaccacctgtaccactatgaccacgacagcccaccacccccacagcagaccccactgcgcaagcacaaaaagaaagggcgccagtcacgaccagccaacaagcagtcacccagcccctctgaagtctcacagtcaccaggccgagaggtgatgagctatgctcaggcccagcgcatggtagaagtggaccttcatggccgtgtccaccgaatcagcatctttgacaacttggatgtggtgtcagaggatgaggaggcccctgaggaggcccctgagaatggcagcaacaaggaaaacactgagacacctgcggctacacctaagtcaggcaagcataagaacaaggagaaacgaaa

SEQ ID NO: 389 - DNA, 489 bp, Homo sapiens
  misc_feature (1)...(489): n = A,T,C or G
aactgaggatatagatctgattgacatcctttggcgacaggatattgatctgggggctgggcgtgaggtttttgactacagtcatcgccagaaggagcaggatgtggataaggaactgcaagatggacgagaacgagaggacacctggncaggctgagggtgccggaagcatctggcccgagaccctgctagtanatgnagagactggggagagcattccctgcacagttcccagctgacgtttccagcatcccagaagcagtgcctagtgagagtgagtcccccgcccttcagaacagccttctatctcctcttctgacggggacagaatcaccatttgatttggaacagcagtggcaanatctcatgtccatcatggaaatgcangctatggaagtaaattcatcagcaagtgagattctttacaatgcccctcntgganacccttttagcaccaactacagccttgcacccaacactcccatcaat

SEQ ID NO: 390 - DNA, 488 bp, Homo sapiens
  misc_feature (1)...(488): n = A,T,C or G
gactgaggaataaccccagacctnaccagccagcagccgcactctagaagatgaagcccggagcacagctaanctgcggcactcagcagctacagagcctggtggtgtgttggttgggcacaggctgttcccagttctctctagggcctctactcctgtctccacctttgggtagcactgttccttgtggactggaaaaccccagctggcttcttaaggggagacagccagccagctgtgctgatctggacccaagctcccagcgtgtcttcagagtcaaccgaaaggcacttctttagaaaggccttttgttagggtgcacattaggaaataacaccagttataaatgagcttcttataaacgggcttcatttataaatgagggaggaggtggaaatgtgtttggcacgtccctcggagtcacagttgagtaccctttatccaaagtgcttggattttcagattttggagttttctaatttggggaa

SEQ ID NO: 391 - DNA, 488 bp, Homo sapiens
  misc_feature (1)...(488): n = A,T,C or G
aactgagatatcgtcagaattctggaaaaagccattcagntatctgggacagaacaactagaagcattgaaagcttttgtggaagcagatggtgaatgagaatgtcancctcgtgatctcacggcaactgctaacagatttctgcacacacctccctaacctgccagacagctacagccaaggaggtcctaccatttcaccttggagaagatccagcctcgggtcatttcctttgaagagcaggntgcttccataagacagcatctggcatctatttatgagaaggaggaagactggagaaatgcagcccaagtgttggtggggattcctctggaaacaggacaaaaacagtacaacgtagattataagctggagacttacctgaagattgcaaggctatacctggaggatgacgatcccgtccaggccgaggcttacatnaaccgagcgttcttacttnagaacgaatccacaaatgaacagttaca

SEQ ID NO: 392 - DNA, 484 bp, Homo sapiens
  misc_feature (1)...(484): n = A,T,C or G
ctggtgttccagtatcgcctacnnctgttaaaatccctactagagataagngcttttgcggagttttctgtggaagaccgaccgatgcctgtgctggaaatagggaaggagattgagttaggtcctgaggattacgatatcaagcaagagcacctaacatgtgactgattacaggntattctgggnggcaccaanaagctctgcagagctaaccatgataaaggcaatcatcctcagcctatcccgngggattnttatatcaacctcaagccagaangagcgncngaatgangactatgaccagcntttgcngctgttgncagtaccaagatggccatgttngtntggaaccannatntaaaccgntncacatttcaaaatcttncccaacacagcgaanttnnctntttcatgaaacaantactgttgngnatnttacaaccctatnganaaattgtggagaaaggccacacaagagctgaaa

SEQ ID NO: 393 - DNA, 482 bp, Homo sapiens
gagccccactctgaccctgcagtccaccaacacgcacacccagagcagcagctccagctctgacgggggcctcttccgctccagaccggctcactcacttccacccggagaggatggccgtgtggagccctatgtggactttgctgagttctaccgactctggagcgtggaccacggcgagcagagcgtgatgaccggcaccttagtctagcctcagagtgcagcctgggcacaactttgtgtagacacagagggccagtgccaaagcaagacaagcttcctgacctttgcgggggccatggaaccctcgggcagtgagtcatgacgtgctgcaggttcaaccacagccctgggctgtggcctgagtacagactgcattgctgctggtccacacaggaggctggagtccagaccacaggcatcctaagacagggccaagcgggaaagctgcaggtagcttacaaaccatcacgagtgccttc

SEQ ID NO: 394 - DNA, 481 bp, Homo sapiens
  misc_feature (1)...(481): n = A,T,C or G
caaagctctacatggctggcaagagtcattcgngcaagcggtcatggactgcttntggggctgctggtcactgtagccaccatccacctggttatatgtccctacaccaaggtnnaagagagcttcaaccttcaggccacacatgacctcctgtnccaccagctggacatagacaagtactgaccaccactgagtttcctggagttgttcctaggacgttcctcgggccgntggngatcgcagcgntntccagccccgtggntnatgtgctctcgcttttanaagtatccaaattttattctcagctgatagacagaggagtccttgggcttggtgngatttctggactntggacattacaaaaggaagngagacagcagttngnagccacggtggctgtnatgtnctgctggatatnanccacacaggtttcatctcatgttctactgtacgaggacactccccaacgtgttggccctgg

SEQ ID NO: 395 - DNA, 481 bp, Homo sapiens
  misc_feature (1)...(481): n = A,T,C or G
ctggacaagtttgaagagagtgttcagtgaataaaggccccaaacactggagaagtatatggggaaatgaggagacctgcagacagcttaccatattcacacctccggagaagtcaggggaacagatggaattctgaatggccatgcccaccatgggaccagagaaggaagttacactgcagggcagagaagctccaggacatgactctcactgtccagctnnnaggaaatcctcagggcctcaggtannccantntgtggncaccacaggcatgtcacctccnctatccctgcncacatacttntatnctataaaattagaaaacctcaggnannnccaantnttncggctcacccaatcccggatgcctgcnaancaccanccgcangagcgngcgtnncactttattaagcaagaaggngggcagcatcccttcaatcgccatacacagcgtcgtcgttgctgtcgctgtgatgttgc

SEQ ID NO: 396 - DNA, 481 bp, Homo sapiens
  misc_feature (1)...(481): n = A,T,C or G
agatctggcgaccctgntgatggncagaggtatgaaaagatctcagacncagccttggaaacagaatcggntgccactcggggtanccttgacagatggagcctgcttanttacaccaaaacgactccttgtgaccaagtctgtgnggcaccgttgtggtctccatcccancctganccagngacttcctgacttctggactcctcacanngnngnttgaaantaaatcactttcaaagtaganacaattcaaagantatataccttantgcntannccgtcctgaattnaannntatacttatacttgnttttcccctcctcgntgagcctccangaccgtgtggctgtggtcaaaggcacatatgagccagaggaggactgggaagatcatagagaggagcggaagaagaccatngagctgacggnacactgaccggnaccgggcaggggccagtccctcancccctggaccactggag

SEQ ID NO: 397 - DNA, 480 bp, Homo sapiens
ctgagaagaaaatgacagagtgtttggaagattattacttttggaagtcctgctaatatccatttcctaagagatagttgaccaacattgactctggcatggcgcaaaacagtccacagcttgatattcaggttctccatgatcttcgacaacgttttcctgaaattccagagggtgtggtatcccagtgcatgttacagaataacaacaatctagaagcctgttgtcgagccctttcccaggagagcagcaaatacttgtatatggaataccatagtccagaagacaatagaatgaatagaaatcgccttttgcatattaatttgggtattcattctcctagtagctaccacccaggagatggagctcaccttaatggtggtcggacactggtacatagctcaagtgatggacatattgatcctcagcatacagcaggcaaacagctgatatgtttagttcaggaaccacactctcatg

SEQ ID NO: 398 - DNA, 480 bp, Homo sapiens
gctgacacactctcacaagccagctgcaggcctcggtcctagaagatggcagacatgcccagtggcgagtcctgcacctctccactggagctgttcaacagcatagctactcaaggggagctcgtgaggtccctcaaagctggaaatgcaccaaaagatgagattgattctgcagtaaagatgttgttatcattaaaaatgagctataaggccgccatgggggaggagtacaaggctggctgccctcctgggaacccaacagctgggagaaattgtgactctgatgccacaaaagccagcgaggattttgtggatccatggacggtgcggacaagcagtgcaaaaggcatcgactatgacaagctcattgttcagtttggaagcagcaaaattgacaaagagctgataaaccgaatagagcgagccactggccaaagaccgcaccgcttcctgcgccggggcatcttcttctcccaccga

SEQ ID NO: 399 - DNA, 478 bp, Homo sapiens
  misc_feature (1)...(478): n = A,T,C or G
ggttccctcgatctggtngggcatagcacttgaaggtccagctgcnnaaccccctggtactgaacgaggcanacaacacagactggcncctactgcaaggtgacagtgatgtcagagnagaanagaaaacgtcccggaanaagtggagcttgnggggacttaaggaggggacctacctgttccaactgacaagaactgactnagaccaaccagaggaaacagccagccngactatcacttgggcctaactgccaagcanacagaagattattgcctcgcatcctacaangngggccnctgccggggctccttcccacgcttggtactacttacccccaaggaacagatnctgcnaaagttttnacttttggagggttgccttgggcnacaagnaacaactaccttcgngagggaagagnggcnttctaccctgcaaaggntgtgcaaggaatctcnccgaaaaaggcacccatcccag

SEQ ID NO: 400 - DNA, 477 bp, Homo sapiens
  misc_feature (1)...(477): n = A,T,C or G
ccacacccagctcatgatcctgtcttggaagtctcagtacctaggaagctcttgctccaaagaaagagcagccccgggaatagaantaagagagtggaccttataagggatgctgatgactaacctactacagtccactgcaagagctagacgactctccccatcctgctcatgggagaaaacgacaatgcaccaaaaattctaggctagcctcacgtttactatgtagccaaggctggccttagtctaagtgctgagacaaccggcaggcatgcaccacttttctcagcaagcttccttcctcttgcttctgtgcagcagattgcgctggctcaagctgtagacagaggataatgagttcccactgcagacaccaaggcaggccaagaaggtctcttacctggcacagtgctgggtgcctgtctacatggctcttggggctcccactccggatactggtagacaccagggctggtc

SEQ ID NO: 401 - DNA, 476 bp, Homo sapiens
  misc_feature (1)...(476): n = A,T,C or G
gataagaaatcgacttggaaactgggattttggagtcgaggagggacccggtcactctggaggatgtctaccccattcacatgatcttagagaacaaggatggcatccagggctcctgccgatactttaaggagagaaaggacatcaccagtagcatcaggagcaagtgtttgcagcctcgatgtacaatggtagaagccttcagcagggttgacgctgggaagcttcattatcacaggaaaattttgaacaagaatgggctcattacaatgcagtcacatgtgatccgattacctactggagcccagcaacactccatcctcctactccttaaccggtttcatgtggacagcctaacatataccacctcttgctcactcacaaattcattgctactttttctttaattgttgcttaatgtgtgtgtttatgtgggtatgcatgtgngtttatgtgtgnatgtatgtgtgcgtgtg

SEQ ID NO: 402 - DNA, 473 bp, Homo sapiens
  misc_feature (1)...(473): n = A,T,C or G
caatgccaagagcctaggagtgcttgggactgaaccagggtcatggccccaccaccactactgccagtggctgccagcactccaatcctgcacggcgagtttggttcctacccggccaacggcccacggtttgccctcaccctcacaacacaagccctacacatacagcgactacgcccaaagccagaagcccggcccctgagatggtctagtctctctggatgaggtctcgggttgtggcaccctgcagagccgtagccccgaggacactgcagcctacttctgcatctacacctacccacgtggccgtcgagggggccggcgcagagctacgcggaccttccgggtggatggggccaccacttatgaggagaatcgtgcagaggcccagcgctgggccactgccctcacgtgtctcctccgaggagtgcctctgtcangggaccaggaaatcacccctgaattgctgcccc

SEQ ID NO: 403 - DNA, 467 bp, Homo sapiens
gactgaggaagatgctccaagtacttccttgagttcttcgatgcacgggaatggagtattaaattccagggatgcagcaaggcacactggctggagcaaaacgctacaagtacctcagaaggctctttcgatttcggcagatggactttgagtttgctgcatggcagatgctctacctgtttacctctcctcagagggtttatagaaactttcactaccggaagcaaacaaaggaccagtgggccagagatgaccctgccttcttagtcctcttaagtatctggctctgtgtgtccaccataggattcggctttgtgctggacatgggattttttgagacaataaagctgctgctgtgggttgtgtttatagattgtgtgggtgttggccttctgatctcaacgttaatgtggttcgtctccaacaagtacctggtgaaacgccagagcagggactatgacgtggag

SEQ ID NO: 404 - DNA, 463 bp, Homo sapiens; identical to SEQ ID NO: 22
  misc_feature (1)...(463): n = A,T,C or G

SEQ ID NO: 405 - DNA, 453 bp, Homo sapiens
  misc_feature (1)...(453): n = A,T,C or G
caaaatgaatatattgaattgcaccgcaaacgatacggatatcgtttggactaccatgagaaaaagagaaagaaagaaggtcgggaggcccatgaacgttcaaagaaggcaaaaaaaatgattggcctgaaggctaagctctaccataaacagcgccatgccgagaaaatacaaatgaaaaagactattaagatgcatgagaagagaaacaccaagcagaaggatgatgagaagacgccacagggagcagtccctgcctatntgctggacagagagggccagtcgagagcaaaagtcctttctaacatgattaagcagaaacggaaagaaaaggcgggaaaatgggaggtccctntacccaaagttcgtgcccaaggagaaacagaagtattgaaagttattcggacaggaaaaaggaaaaagaaggcctggnacagaatgggttactaaaag

SEQ ID NO: 406 - DNA, 452 bp, Homo sapiens
gaactgaggatcctggtgatgcagcccaacaggaagcaaagcaaagggaagcagaaatgagaaacagtatcttagcccaagttctggatcagtcagcccgggccagattaagtaacttagcacttgtaaagcctgaaaaaactaaagcagtggagaactaccttatacagatggcgcggtatggacagctaagtgggaaggtgtcagaacaaggtttgatagaaatacttgagaaagtcagccaacagacagaaaagaaaacaacagtgaaattcaacagaagaaaagtaatggactccgatgaagacgacgccgattactaagaggacgcacttagacagacttccggagcagtgtctaggacagtcaccaccttgtaaatgtttactttgttccctgtctatatatgccttttgaaaaataaacttgtacctcaaactcaaaaaaaaaaa

SEQ ID NO: 407 - DNA, 447 bp, Homo sapiens
  misc_feature (1)...(447): n = A,T,C or G
ctggtgagtaagcagnacttgntcgctngctatgaccgtctcctcctgcagtctaccttggatctaatggcagatgnggtgtattgtccccgtccatgctgccagctccctgtgatgcaagagcctggtggtaccatggctatctgctccagcctgcaattttgccttctgtaccttatgcagactgacctatcacgggctttctccatgtaaggtaacntgcagagaaattaatagacttacagaaatgaatacctacaagcagatgaagctactaagaggttcttggancagaggtatggcaagagggttgattcagagggccctggaggagatggaaagtaaagactggctggagaagaactccaagagctgcccctgntgtggcacacccatacaggttgtctccatgcccgtggatattaatggtgatttgcgggaagatga

SEQ ID NO: 408 - DNA, 446 bp, Homo sapiens
  misc_feature (1)...(446): n = A,T,C or G
ttctgaggttccattttcccggnccctgtgggaaaactcttcctgaagcccttgctcctcatgaaactgaaaggacttcttaaccgccctgtggaaagaggagaaggacctgcantacggtatcctggagtgctaaagcagggcactaacagggaaaaatggctttatggatggtgagcatgaactctggaaaaatatggaaacacccttcaagccccaagcagacaatntgttacgtgatgggtttcaaaataccagcagcaaatgtgtttgatctggaagaggcctgtcaagtccttccatattatttgatttgaactgaaatatgagtaattgggatttgatattttttggttagttactggaagggaaaattttgtaattaaattgctttagaaggcaattatcctgattgtatgtttgcatnttgggcaaaaacagaaaaa

SEQ ID NO: 409 - DNA, 438 bp, Homo sapiens
  misc_feature (1)...(438): n = A,T,C or G
atgtgaccgctaatcatgcagtacttgaaggagaacagtttacatcgggcactggccaccttacaggaggaaactactgtctctctgaatactgtggacagcattgaaagtttcgtggctgatattaatagtggccattgggatacctgttttacaggctatacagtctctgaaattgccagacaaaacccttattgatctctatgaacaggttgttttggaattgatagagcttcgtgaattgggtgctgccaggtcacttctgagacagactgaccccatgattatgttaaagcaaacacaaccagagcgctatattcatcttggaaaacctcttagctagatcttactttgatcctggtgaggcatatcacaggatggaagtagnaaagagaaaaggagagcagncgantgcccaggctttagcctggggaaggt

SEQ ID NO: 410 - DNA, 432 bp, Homo sapiens
  misc_feature (1)...(432): n = A,T,C or G
actgaggtggggtctttnagagtgtctaacgggagcccgagcctggagcggatggacgccagacaagcggatcaccccaagccttccgcctgcagaaatctcttcggcccggtcaatcatgaagaactaacccgggacttggagaagcactgccgggatatggaagaagcgagtcagcgcaagtggaatttcgactttcagaatcataagcccctggagggcagatacgaatggcaggaggtggagaggggcagcttgcccgagttctactacaggcccccgcgccccccccgcctttgttaaatagtatggctgtgcttaaaaggttgcatactgagccaagtataatttttgtaatgtgtgaaaaagatgccaattattgttacacatcaagcaatcaataaagaaaacttccgtagttaaaaaaaaaaa

SEQ ID NO: 411 - DNA, 472 bp, Homo sapiens
  misc_feature (1)...(472): n = A,T,C or G
actgagtatccctggactgatgatgtcatccagccagctgctcctgttgacccgggacacccacccttagctgactcgtcccaccatggtgacgctgtcagctcagtctctacacatctgacagtccagagcgcctccccatctgctgcccgtgcaagtcctgctcctttggccccagaacatacagcctcggctccctccgcagccggtcctggagtagaagtcacccccactgcctccccccaacacctggccaagaacgaacccaggagttccgactctgaggaagcctttgagacccccgagtcaacgacccctgtcaaagctccaccagcccctccccctccaccccctgaagtcaccccagagcctgaggttatcgatncaccagccccagaagaaccaggatgcatgtttcaaataaaattctctattgnaaatnaagtttttttctttgagtcttgaaaaaaaa

SEQ ID NO: 412 - DNA, 423 bp, Homo sapiens
  misc_feature (1)...(423): n = A,T,C or G
gaggaaccacaccctgcgggcaccgcnaggacatcncacatgtcngatggggccacttgnanctncnacctctncgagcccntggcatgagcacctgtgtaggagatgacatcaccatgggcatctgacctggaantggcaaccacngnnagaagcngtatatcccgagcctnagatgactntgcccagaanaacggntnccggtgcgcagngctaaaccaccatggnagccctccccaacattgagctgacctccccacgaatgttcacctatggctgnacgtgggaatttggagccatggtgatctacattaagaggacatatccccaganccagctggtcntnngngggcttnagcctgggtggcaacattgtgtgnaaanacttgggggagacgcangctaaccaggaaaaggtcctgt

SEQ ID NO: 413 - DNA, 410 bp, Homo sapiens
  misc_feature (1)...(410): n = A,T,C or G
cttcagtatagatcctgaagngacagannaagaaatagaantgaggttttgtnagnnnnccatcctggtgcatcctgnctnctatccaggacnatgctgacagagcacaganangcttttgaagctgcggacactgnnnacnagtngctactggatcaggaacannagaagagggccctggatgtaattcaggcaggaaaagaatacgtggaacacacctgttaaagagcgaaaaaaacaactgaagaaggaaggaaagcctacaaatgtggaggaagatgatcccgaactgttcaaacaggcagtctacaaacagaccatgaagctgtttgctgagctggagattaaaaggaaagagagagaagccaangaaatgcntgagaggaagcgacagagagaagaggagtgta

SEQ ID NO: 414 - DNA, 402 bp, Homo sapiens
  misc_feature (1)...(402): n = A,T,C or G
gcctcacgcacgaatatttcctgagagactccgctncccatcgaccnatccatgttccccacngtggngctgccaagagngancnntagagagtgangncgagncacnagtccacngcctcntgagggcggtctggccctacanccagctgggtgangangacntgaaggagacgggctttccacctcaccaccancaaccanggancntcnacatgcaggncctggattcagcctnaagttntgaggtcggtattgatggacgtggcccgactaggtggtgacagccnnacctgctgatgcctgaatcanggcagcttggttgntttttccacgttgtttgntttggggcaggttgtaaatttgtagaatnaaatgaaattttccttttggagggaaacaa

SEQ ID NO: 415 - DNA, 397 bp, Homo sapiens
  misc_feature (1)...(397): n = A,T,C or G
catacctgtcacaatgattaccctgatctggaggaggagctgtcccaaagacatgaacnttcatgcntgatccagatgtctgtgctttacttcaaaaacattgacttgttggacaacaaaaagtgaaaacttggattgcagcagtgattcacaggcatttccctcattgaataataaagaactaacaggtatcagaaacatttcaagccaggaaggatcaacggatgttgtagccaggacccagaaagatggcttccatatcttcattgtttctattaaaacggagaaaacagatgcagtctgggatttaaatgtttctctttctatggtgggtcctcatgggtacatctctgcatcagactggcctctcatgattttttatatggtgatgtgtatt

SEQ ID NO: 416 - DNA, 394 bp, Homo sapiens
  misc_feature (1)...(394): n = A,T,C or G
aatgacattggtgtgtctagcctggactgcagggaggcattccgcctgctgtcacccacagagcgcctctatgcccatcacctgtctagagctgcttggtatgggggcctggcagtgctgctccagacatcccctgaagccccctacatctatgccctgcttagccgtctcttccgtgcccaggaccctgaccagctgcgccaacatgccctggctgagggtcttacntgaagaagagtaccaggcattcctggtctacnctgcaggggtctactccancatgggcaactacaagtcctttggtgacaccaagtttgttcctaacctgcccaaggacaagctggnacgtgngatcctggggagtaaggctgnccaacagcggccagaagaaagt

SEQ ID NO: 417 - DNA, 511 bp, Homo sapiens
gactgaggtgctgcagtttcttgtttcacattctgataccatccaagcaatcctgcgctgtcaggatgttagcactggctctttgcaggaattagctctgctgacaggaatcataagtaaagcagcgcttcctggtatgttaagtgaacttgatgtagatgtaaatgaaggatccttaatggagctccatggacacattgcaaggtttcagcgccagtgcttaggcctactaagtcgctttggtggtgctgacagactgcggcagtttaaatttcaagataataatgcggagggagatagggtcagcaagaaagatgaaattgagctggccatgcagcagatttgtgccaatgtgatggaatattgccagtcattcatacagcagaactcctctaacctccagagtgctgctatgtgtctcttcaccccgagcctttcagagacagttaacagagatggagcacggcaagatacccaggttccagtcgttccgtattggcgcctgcctggc

SEQ ID NO: 418 - DNA, 390 bp, Homo sapiens
  misc_feature (1)...(390): n = A,T,C or G
actgagagaatattgtgagctccttttcctgngacactgtggctggaacancacggagatccagtctgcnngcaggatccangnccagggagngcgctacaccttgaccgtganaagccangaggncatgancagagaantggtaaatgacagactctgccaccacanggatccccgagcgtggnttttgagattccagccttcanccagaagggagctntgaccantgttgaaggacttatnagagcgtgcaatctttggcctgnaacnggatcagcccacncgacgagggagtggtaggtgncatcnnatanagaatggatgagnnnattgncaaactgagggacctaaagnaaatggctttcccccttntnacactgggcatttgat

SEQ ID NO: 419 - DNA, 387 bp, Homo sapiens
  misc_feature (1)...(387): n = A,T,C or G
tgaggaagcaggtcgtcacccaatcggagacgtagaggcgaagattcttccaccggagagctactgccaatgcccacctcaccaggagccgacctgcagagcccacctgcacagaatgccttgttttccagccctcctcagatgcattctttagctattcctttggactttgatgttagntcaccattgacatatggcactnccagctcgcgagtggaaggaaccccaagaagtggggtgagaggcacacctgtaaggcagaggccagatctgggctcagcacgaaagggtttgcaggtggatctgcagtctgatggcgcancngcagaagacatcgtaccaagtgaacagtctctaggncaaaagcttgngatttggggaacagat

SEQ ID NO: 420 - DNA, 372 bp, Homo sapiens
  misc_feature (1)...(372): n = A,T,C or G
gagagccatggaggaggtggngatagccggtatgtcggggaagtngcccgagtcagagaacctacaggagttctgggccaacctcattggtggtgtggacatggccacagatgatgacaggagatggaaggctgggctctatggattacccaagcggtcctggaaagctgaaggatctctccaagttcgacgcctccttttttggggtccaccccaagcaggcacacacaatggacccccagcttccggctgctgttggaagtcagctatgaagcaattgtggatggaggnatcaacccagcctcactccgaggaacgaacactggcnnctgggntgggtgtgagnggttcagaggcatacgaggcccttag

SEQ ID NO: 421 - DNA, 367 bp, Homo sapiens
ctatgacttggctccgtttcgaatgagtcgcttctctacgctgagcaaagcccacctttgaccccagctgactctctcctgggcaggaaagccctcctaggggagatttccaggagatgtggccttgacgagtttcttctcctcctgattcaatggaatctcccataaacaccaaatgattgaacattttccccccaatcagcctccctagtctatctcatttctccttcccagaaagtcagcgagattcaccatcacagaacagcaaggggctttaagatggatgtctcaatggggaggggctggagacaggctcagtagactaagggactcctttaaatttctttttgctgggacactggggtga

SEQ ID NO: 422 - DNA, 362 bp, Homo sapiens
  misc_feature (1)...(362): n = A,T,C or G
gtgacatctttgttattgnaatgatnccattnggtctaacatgcggtcagtgcattgtacntgataagaacagacgctgtcggtcanagatgaacgttcaggcggcgngnaancttggctacacaggaaagaatgtggncgtcaccatcctcgatgacggcatanaaaggaatcacccanacctggcccccaactacnattnctatgcaagctacgatgtcnatggaaatgattatgacccatccccgagatatgacgccagcaacgagaacaaacatggcactcgctgtgcgggtgaagtcgcctgcctcngccaacaactcctactgcatcgcgggcatngcntataatgcaaataaacg

SEQ ID NO: 423 - DNA, 348 bp, Homo sapiens
  misc_feature (1)...(348): n = A,T,C or G
gactgaggcgatgcagttcttaatgaagctgctcantatcctgcggttgctgcacatagaagagctcagagagctacagacaaaaattaatgaagccatagtagccgtccaggccatcattgctgatccaaagacagaccacagactggggaaagttgggagatgagcacatgaggatgtcagccttctcacctgcctagtgatgggaaccattacaccagcatgtgcttggaaatcagatgtcacacttggaagggagaaccccaggagattgaccatgttctagagatttaccaccgctgctttttctttaataaagttggggaagtaaaaggctaaaaaaaaaaa

SEQ ID NO: 424 - DNA, 347 bp, Homo sapiens
  misc_feature (1)...(347): n = A,T,C or G
ctgagtcctgctctctaatgcatcaactcagtcagaagacagaccattaaaagccagcactgcatgcagacaacacaaagggcatcctcctttgctgccgcagaggacaacatagctatggataaggcggcggtatncacaaggatacctcatctgtacctctggctagagatattgaatattctttcancacggcccttgactgngtatgctcagcacaccagcctnccagaagnngngatacccttacgggtcacaggcaacagaccaatgtgggctatggnatggctgacctatagcctgnattttggnggccacnaancattntattcacataaaggccaaga

SEQ ID NO: 425 - DNA, 338 bp, Homo sapiens
  misc_feature (1)...(338): n = A,T,C or G
aaatatcgctacacccanctgtctactggggacctgcttnggncagaagtcaagctctgnatccngngagngncaangaagctgtccngatatcatggagaagggagagctagtgccactggacaccggtgctggacatgctcccgaggatgcctatgttagnccaaanttggattcttncaatggcttncctgatntacggctacccgaggngaggtgaaacaagggagaagaatttgaacagaagattggacagcccacactgctgctgnatgnggacgcaaggcgncgaagaccatagacccaacgactnctgaagcgaggggaagaccaggtgg

SEQ ID NO: 426 - DNA, 336 bp, Homo sapiens
  misc_feature (1)...(336): n = A,T,C or G
cttctcttccattcataagctgggtgctacagnncannatacaagnagntcnnnancagccacttggagccctanaaggtgaggaagatggaatcagaccagggaccaacatgaagactgttagcaacacacaatcttggccctagcaggcactgtacagaaagactgcagctgtctcttaccctgacaatattctgcagttcaatgacataaccagtgtgtctcaggcccacaggctggcccgaagctaggcgcttatagcctggttctgactcctaaagaaaagaagcatggaagatacagaagctgcaaacatcatccaagaacaaggcttct

SEQ ID NO: 427 - DNA, 507 bp, Homo sapiens
gactgagctcctccagagttcctgatctatgaaatggcagagaatggaaaaaattgtgaccagagacgcatagcaatgagtaaggatcagcacaatggaagtctcacagacccctcttcagttcatgagaagaagagaagggatcgggaagaaagacagaatattgtcctgtggagacagccactcattaccttgcagtatttctctctggaaactcttgtagttttgaaggaatggacctcaaaattgtggcatcgtcaaagcattgtggtgtcctttttactgctgcttgctgcgcttgtagctacgtattatgtggaaggagcgcaccaacagtatgtgcagcggatagagaagcagtttcttttgtatgcatactggataggcctggggattttgtcctctgttggtcttggaacaggactgcacacctttctgctttatctgggcccacatatagcttcagttacattagctgcttatgaatgcaattcggtgaatttccct

SEQ ID NO: 428 - DNA, 331 bp, Homo sapiens
  misc_feature (1)...(331): n = A,T,C or G
cagcattcagggcaacatctcatnaccgccgggtgctgaccttctcttcgggcatgnagaccacagcatgggagttagggagactccggagtgtgattgagttggacagcccttctgtgactgntgagcaggtggctgctatcgagcagagtgtcaatcagaaaatcagagaccggctgcctgtgagtgttcgagagctgagcctggatgaccctgaggtggagcagntgaggggtcnnggtttgcccgatgatcatgctgggcccattcnagttgntaccatcgaaggcgnnnactccaacatgngctgtgggacgcacgtgagcaatct

SEQ ID NO: 429 - DNA, 328 bp, Homo sapiens
  misc_feature (1)...(328): n = A,T,C or G
gagagtgtgtggtaccattccttacccggcctaaggtccctgtcttgcagctggatagtggcaactacctcttctctgctagtgcaatctgccgatatttttttctgttatgtggctgggaacaagatgatctcaccaaccagnggctggaatgggaggcaacanaacctgcacgccagttctgtctgcgtgccctacacctgtctagtggttcaaggcaagaaaggggaagatatacttggcccacttcggagagtcctgactcacattgatcacagcttgagtcgtcaaaactgtcctttcctggctggggacacagaatctataa

SEQ ID NO: 430 - DNA, 327 bp, Homo sapiens
  misc_feature (1)...(327): n = A,T,C or G
aagctcttctacagctgtgctcatgtctgatgttgaaaagttcatgcctattgtttacacccccaccgtgggcctcgcatgccagcagtacagtttggcattccggaagccaagaggcctctttattagtatccatgacaaagggccacattgctttcagttcttaatgcatggccagaggatgtcgtcaaggctattgtggtaactgacggagagcgcatccttggcttgggagaccttgnctgtaatgggatgggcatccctgngggtaaaactggccctgtncacggcatgtggaggggtgaacccacaacagtgtctacccat

SEQ ID NO: 431 - DNA, 315 bp, Homo sapiens
ttagctggtagccacaacaactggccccacctgtcttggagagcagcttcgtggaaaagatgaagaaaacgggaaggaacattattgtattctatggctcccagacgggaaccgcggaggagtttgccaaccggctgtccaaggatgcccaccgctatgggatgcggggcatgtctgcagaccctgaagagtatgacttggccgacctgagcagcctgcctgagatcgacaagtccctggtagtcttctgcatggccacatacggagaaggcgaccccaccgacaacgcgcaggacttttatgattggctgcagg

SEQ ID NO: 432 - DNA, 307 bp, Homo sapiens
  misc_feature (1)...(307): n = A,T,C or G
ccactgctgaagctgcaagccaaggacgncttcttgctctgaggacattgctatcacaaggatataatgnaaatgcagtaaccatagaccatgtcactccactccatgaggcctgcctaggcgaccacgcggcctgtgcaaggactctcctggaagcctggggcctaatgcaaacgcnntcaccatanatggcgtgactcccttgttcaacgcatgcncacanggcancncatgtntgcgcanaacncctttngnaanatggtggcccaagcccaactggagtcctggtttaatcttcaacacatga

SEQ ID NO: 433 - DNA, 302 bp, Homo sapiens
  misc_feature (1)...(302): n = A,T,C or G
actgaggacacctccctgctcccagnaacacagccatacattcttgaagctttaacgccatgtccaagaatttgctgacatttgaggatgtgtctgtaaatttcactcaagaggaatggcagtggctgagtgacacacagagagatttgtacaggaaggtgacattggagaactataagagcctggtgtcactgggtaaggcagtctacagaatcccaagtctgtgttccatgaactgtctctgggtcgctttactaaatttcctctttttattaaaaattttaaaaattataaaaaaaaaa

SEQ ID NO: 434 - DNA, 296 bp, Homo sapiens
  misc_feature (1)...(296): n = A,T,C or G
ctatgctggaaaccgtagactcggtgaagctggcagacaaggtgaatagctcctggcagaagaaaggtcctacagaaccactgaaggtgatggtccagattaacaccagcggagaggacagtaagngactaggcctgaccatggaggtttgctctcttgagatggctgaggctcggggagagtgtgagtgtaagcatctgctgaggagactgtgaggagaagctccancctcctggtgagctgcttcgtcaagattcaccagtgtgatgacccaatntaattctttaatatatttc

SEQ ID NO: 435 - DNA, 289 bp, Homo sapiens
  misc_feature (1)...(289): n = A,T,C or G
gaacatcgcccttgtccgcctgatcatggggggctaccgacagnccctgagcctgattgagcgagggancccagcgcncagcctggagcaggtgtgtcgctgggcacactcncagcagtnccnggnccctanccccactgaacatcncgaccactntcatnttnnttacgcgccagaactttnggccccctngggggntntgcacctttttantggnatgattccccccaactaaaaaaanttntgccctcaaaccacataggatnngcnttcttcttcaaccttttag

SEQ ID NO: 436 - DNA, 282 bp, Homo sapiens
  misc_feature (1)...(282): n = A,T,C or G
ctggcaggcacagcggacacccagttcatcgatgagaaccctgagctgnnccagcttcnggctgcacagaaccgggcccagaagttgctacattacctcggacatgtnatggtgaatggncctaccacgtccaatccctgncaatgtgagccccatatcctgtggatcctgctgttcctgtggngcccataggcccacctccagctggtttcagggacatccttctgcgagaagggncagagggctttgcccgagctgtgcggaatcaccaggtgctgttgt

SEQ ID NO: 437 - DNA, 275 bp, Homo sapiens
  misc_feature (1)...(275): n = A,T,C or G
gactgagtctgatctgcaacaactccgagttctgaggacaccctgcaaggagctgagcagatgtggacagtggaaggtgaccgtcacagatgtgctgcctactcaccccaagacctgcacacacatccatggggcctcatgctcattacccggttccccaggnaacataagnggtgagactgcttctcatnaagaggcacggcaggngtgtccatttanctacctctcagcgtagctgtgnctcaggctctacatcaccagcaaaaaaacaaaca

SEQ ID NO: 438 - DNA, 274 bp, Homo sapiens
  misc_feature (1)...(274): n = A,T,C or G
gctctgtctcatgctncaaaggaacccagatccgtcaacgagtatgtgataatcctgctcctaagtgtgggggccactgcccaggagaggcccagcaatcacaggcctgtgacacccanaagacctgccccacacatggggcctgggcatcctggggcccctggagcccctgctcaggatcctgccttggtggtgctcaagaacctaaggagacaccaanccgctcatgttntgcancaacacnttcacaccanccccctgggaaaccctgctc

SEQ ID NO: 439 - DNA, 268 bp, Homo sapiens
  misc_feature (1)...(268): n = A,T,C or G
tgacactctggcgtcatcgggncttntgggnccttcttctggttcgtgggttttctgcttcctggccaaccagtggcaagtctccaaagcccaaggacaacccttnttgaacgaaagggacggacgcaggcccngggctgccatccggcttctccttctttctccattttcacngtgganncctnganagcagnccctgggccgtaccgcaagatttcaagggagccttaccctttcaaggaaggaatacaacacacttgtttccttg

SEQ ID NO: 440 - DNA, 268 bp, Homo sapiens
  misc_feature (1)...(268): n = A,T,C or G
actgaggtaagagtcttatttggacagattgagcctggcacagctgacccaacttttcctaacctccgtcctagagtgtccgttctataagggccccaaacttcttcctaantatcaagtgaagtcatttctcactccatgctgctccttagagacgcccatggatctccatctgnataagtctgtggcgattggacctgattgatnttttaggatcaagactgtattttgcttnaaaggngtggacgccctattactacactataga

SEQ ID NO: 441 - DNA, 262 bp, Homo sapiens
gactgagccctgccgctgaggccccattgtctccacttcaacgtgggggcccaccaggatgagcaagcgacctggtgatctggcctgtgacttggagcgcagtttgccggccctggcctccctgggcacctcactgtcccacagccagagcctctcctcacacttcatcccgccacctctggagaagcgtagggccatctccgacgtccgccgcaccttctgcctcttcgtcaccttcgacctgctcttcatctcccttctt

SEQ ID NO: 442 - DNA, 241 bp, Homo sapiens
  misc_feature (1)...(241): n = A,T,C or G
gagattgtaactttgtgtcagcgtgcagtccataaagtgccagcatggggaanaaacggaccaaggggagaagtgctccanacacgggnggcctcagagtctgcagaaccagtgtgcanacacctttanaaaagggttggaacaaggtattttgaaaaaagctttagtaaatgtggagtggaatatctgccaagactgtaagactgacaataaagtgaaagataaacctgaaaaaaaaaaa

SEQ ID NO: 443 - DNA, 341 bp, Homo sapiens
  misc_feature (1)...(341): n = A,T,C or G
tgcaggggacgcctccanatggatgcangcagnttaagttcattcgatgcattacttgttagaagacctngnagaacctaggganacttcnacttgngaaagctaaggaacattganctgatttgccaggacaatgaggggggaaatgaccctgtactgcagaggattgtagatattctttatgccacagacnaaggctttgtgatacctgattaaagngtcccaccgnangaacaggaagagtattaagcagcttggnccagcagagcaacatccgaagtattcgctccaaatcatgngcttnactgntaaatattccctnttattactcttagaggatt

SEQ ID NO: 444 - DNA, 223 bp, Homo sapiens
gactgaggtgcaccttctgtgttagccttcctgtgatatataggatttgctgagaagaggcccacctgtaaattccggagaattacaagcaggaaagggcatggagctcggcaaagagaaggcaaatacctgggtcatctcccggatggacatcacactatccagagctttctgaagccgctcataattcttcttctattgatagtcaatgagaaaaaaaaaa

SEQ ID NO: 445 - DNA, 223 bp, Homo sapiens
  misc_feature (1)...(223): n = A,T,C or G
aaagacacctgccatgttgtcgatatccagcttgcttgctcatcacctcgattttgtcattgtggcagatccctgngngncacagccgctccagcatctnaatctcatctgaggatgaggtcagagtcacttattaggagcacgctctcctcagatacagaatccaggccccagacccttccaatcttgaaaaccctnctncccaggaccgagggccagccct

SEQ ID NO: 446 - DNA, 218 bp, Homo sapiens
  misc_feature (1)...(218): n = A,T,C or G
acttggaccctagtcatgagcatagcaagctggagatacccgcagccacaggggccgganncttaccctaggagnntccagcttcagcanatngagnttgtcaaagggcaggntcccagaagcacccttgattggaatacaaaccnagatcacctgccgccattcctcccaggacacgtggccaagattaaaggaaatggaaatgctaaaaaaaaaaa

SEQ ID NO: 447 - DNA, 216 bp, Homo sapiens
  misc_feature (1)...(216): n = A,T,C or G
taatatatatgaaggcntggccagnatccccttacacttccgaaactgcattttggtgccagcagccttggtgaccttgagaacattgaatggacactccaacagtgacaatgtctncgatctgtacatncctgaaacagggaggcaggtgctcagacatgttcttgtngacgcttcttaaagtgattattttttccngatgtaaccggggaaaaa

SEQ ID NO: 448 - DNA, 199 bp, Homo sapiens
tagtccgtaagagaatcaatggacaggcttcagttgatacagaaggagccagcacttttgcctacacactgtctgcttctgggagagtgagtctgtgcagccactcctcctcttgtactcctggggcacctcacagtggggcaagtagacaatgccaccagacagaaggactgggtaaggccaaacaggctcagactcc

SEQ ID NO: 449 - DNA, 197 bp, Homo sapiens
  misc_feature (1)...(197): n = A,T,C or G
gactgaggggatgatggcgtgggcanaaagtcagtggtctgagcagtatccttcctgcggnggggaaaggcagacgcccatcnacgatgaagacggaggaggtgangtacacttnntgatnatggcccngtgagcttggtgaactatgagaaggagaaccctggagttcacctatgactaacaactggacacactag

SEQ ID NO: 450 - DNA, 183 bp, Homo sapiens
  misc_feature (1)...(183): n = A,T,C or G
ggcacgaggatgtagtaaaagtgcggctccaggtaccttaccaagcagctgcaggcccttcagtagtgcccaccgcacccccaacctatgaagaaacagagggtgtnaacagtnactacccaacgcccccagntccntatgcncgggaccagnctaagggctcattacaggcccagatgggaa

SEQ ID NO: 451 - DNA, 182 bp, Homo sapiens
  misc_feature (1)...(182): n = A,T,C or G
cgtggtgagctacagaggagacctccaggtaaagcccaaccctaggcggccaaaagacaagatgtcagctctggctgcttactttgnatgacaacctatcttttccccactccagacacatngtggttatctttgagccacntgaaaccattaaaangctttttattttgtattctctggaa

SEQ ID NO: 452 - DNA, 180 bp, Homo sapiens
tctgtggagaatttcaattagatttagagttttcaataaatgttgctactgaggtctcttttgcaaagctgaatatagctcatgtgcagaactgaaagttaccttctacgatgagcttagcagtggacgtcttctctttatttcccaagcgtagcacacaggtgtattcaccagcatcag

SEQ ID NO: 453 - DNA, 171 bp, Homo sapiens
  misc_feature (1)...(171): n = A,T,C or G
gaccatattcgttcgacctgnacgacnatnaggcctagacaggggatgaccttccttcaccnaaggccgagaagntccacatcntgaacaatacangantatgactggtgggagggcncnctccctgnnctanggacacagaggctatgttcccagcaactatgttgctcc

SEQ ID NO: 454 - DNA, 161 bp, Homo sapiens
  misc_feature (1)...(161): n = A,T,C or G
ctgctggaggtggagaaggtcagtctgcagcaacgactcaaccaattccaacacgagttgcagaagagtaaggagcaggaggagcagctcggggagatgatccaggcttacnagaaactgtgcgtggagaaaagcgacttggagacagagctgggggagaa

SEQ ID NO: 455 - DNA, 146 bp, Homo sapiens
  misc_feature (1)...(146): n = A,T,C or G
gtacagctcctcccacctgtgcacggnccgctctccttgttgtttcggcaaatccgcagctccgatgtgttggtggactcttaaaaagaagtgcanaagggaaagcggcaattgagtcatcacaccaaggtgcttgctgacaggcc

SEQ ID NO: 456 - DNA, 119 bp, Homo sapiens
  misc_feature (1)...(119): n = A,T,C or G
ggtatgattgcgtttcgactgggccggatccgnaacccccaggggcctggcatggntcttctnctgccctttattgactccttncagagggtnngatttgaggacccgagccttcaacg

SEQ ID NO: 457 - DNA, 118 bp, Homo sapiens
  misc_feature (1)...(118): n = A,T,C or G
attccaagctgaaggancagactgccaangacaangacctgcagcacatggctgncatgtcatnagnccagatcgtctcggctactgccatncacaacangctggggctgcctgggat

SEQ ID NO: 458 - DNA, 112 bp, Homo sapiens
  misc_feature (1)...(112): n = A,T,C or G
caagaaggatattaangntnngtctcatccanaacanatnggaccctgctngtagctgacccccgtcgatgcgaatcctaaaagtttggaggtcctggtgcccgagcccgat

SEQ ID NO: 459 - DNA, 110 bp, Homo sapiens
gactgaggttatgttgaagaaggaaaatgcggaagtcgtcatttgacaagttttataaatgagtatttgaagctcaggaataagtgaagctgaaatttgaaaaaaaaaaa

SEQ ID NO: 460 - DNA, 532 bp, Homo sapiens
  misc_feature (1)...(532): n = A,T,C or G
gactgagcgctgcagaaagatctgganaacaagctctttggacagcatcttgcaaaaaaagtcatcctaaacgccgtgtctggtttcctaagcaacccgaagcccaagaagccccttaccctctctctgcacgggtggacgggcaccggcaaaaacttcgccagcaagatcatcgctggagaatatttaccgagggcggactgaacagtgactatgtacacctgtttgtggccacgctacacttcccccacgcctctaacatcacacagtataaggaccanttacagatgtggatcacnngcaacgtgagcgcctgtgctcgctccatcttcatctttgatgagatggacaagatgcatgccggcctcatcgacgccatcaagcctttcctagactattacgatgtggtagatgaggtctcctatcagaaagccatcttcatcttcctcagcaaatgcaggggcagagaggatcacagacgtggctctggatttctggaaaagtgggaagcagagggaagaaatcaagcttt

SEQ ID NO: 461 - DNA, 528 bp, Homo sapiens
  misc_feature (1)...(528): n = A,T,C or G
gactgaggatcttgggtctttgcaacaatttctcatatgtggtgatgctgagcgctgcccatgacatcctcaagcaggagcaggcgtctggaaaccagagccatgcagaaccagnaccaacacancacancccaaccantagcctnataatcnatctggacgtgctaattggcatttcacatagctgccgttagcatccntancgaggacgnttcctttcaccanncngtttgtgatcnnantccngcnnccnttcttggccttcnnttgttgccttacagcccnaagggctgctctgtgagtggagtttgttactgttggnagctttgtnntggangccttctntcantcantgnnngtnntcnngtgtaggagctggttattggcacaggcatntcnctcaggnnctaggggaggcnaccttnctntnactgactgcctnctaccccagtgctgagatntcatggtgnccttngganaccgtagntgcaatgcttctgaggatctgctgtcttacctgggactcac

SEQ ID NO: 462 - DNA, 526 bp, Homo sapiens
  misc_feature (1)...(526): n = A,T,C or G
gactgaggacgaaatggcaccgttacgtgggaagatggccccgcaagtgcttcgtagatgtgaacctaacgcccgactctccaccacatagtatttggactgtgcgccataacttcactgggcccagccacgcccgccccaatgccctggacctggccagcaggatcacccagatgggggcccgcccgtccagttgtcctcgaagggacgacgccagccaggcatccatcgctggagccccggactaagggtgcggccgcccctcccccacgcgctcacttccgtacccgttatcaccgcctaggcggcccgggcgagggcagaactctagccctttctcaggacagccagctcaactcgagcccgcgcgacagtgggtacacattgccacacacttacccgctcacacgccggagaacgctcgtcaggcgagagcacggacctgccccgcccagtagagcgcgcgcgaacagatggngtcatcgcgccgtcccgccccttgccaactccttcctgggccccgaat

SEQ ID NO: 463 - DNA, 524 bp, Homo sapiens
  misc_feature (1)...(524): n = A,T,C or G
gactgagggggcagcncgagccgttcctgtcctcatcataggcattttggtgttcctaccgggattttaccatttgcgcatcgcctattatgcatccaagggctaccggggttactcctacgatgacattccagactttgatgactagccttcgcctcagccttgagaagagtcgcacacagtgcaaccacntttaagacatcaagcaagaacctctggctaagggctgaagaagtctacaatttgcagatgtttagcaaaacaatggccagattgtatgagtccttctccaaaacgctcctgctttataattagctaattaggacatggtatgttttcatctcctggccctggctaaacttgacaagtttttccacatgagtgtgcatcatgtaagagttgtgaagctaactgtctgggaaggcagcctgttctatagcagaaggngttaccctccttagagctgaacctttcttttgtcttccatttgnctgcttggttttgnancataatgggaaaatgag

SEQ ID NO: 464 - DNA, 523 bp, Homo sapiens
  misc_feature (1)...(523): n = A,T,C or G
tgaggtacagcatcgggactggtccccgtctccactcctaccttcctcaggcttccatggtgggttcttgatggacttggttctcttctgctggcaactcctgggcaggagacatggctctggtcagatgggggctgaaaagacagaacttccatccgttgaggaggaggaggagagcagttgctgttgaaacatcacagtcgtcattatctctgtgcttctgttttgngaatatttcatctattacctggtcctctttcggtgccattggcctgaggtgaagactttancccatggaggcaggcaggagcctgtactgaaagccatgtttctggctgacactcacttacttggggagataagaggccattggctggacaaattacgaagggagtggcaaatggagagagcttttcagacagctctgtggttgctgcaaccggaagtcgtcttcattttgggagacatctttgatgaagggaagtggagctnncgatcaggcctgggcagacgatgtgcagaa

SEQ ID NO: 465 - DNA, 522 bp, Homo sapiens
  misc_feature (1)...(522): n = A,T,C or G
gactgaggtggggtctttctnctctgacctgtgcagaagcanatggtncacctngaccnctnacnacaagcagncnatgntactantgggcaacaatgtgngacctggtgaccacctgctggagatgctcatgctgccgcanccctccttgctcacaagttgggggcccccttggtgaagacctcanccaagacgcggcaaggtgtggaggaagcctttgccctgcttgtccatgagattcagagggcccaggaggctgtggccgattnaagcannaagacccgacaccagaaagccgtgttgtagcttgnggctgctctgtanccctgaanatctttgtctagcaaatngacccttgtctcatgtcnaggtgacaattctcttgtantaagatttccctctccgaccaagttaccacagacatctttttattgtcatttggtgagaagttacgtggtaacatgggacatccctcattgactgngttttatganaactctatgcaaaattaaataaatgttg

SEQ ID NO: 466 - DNA, 520 bp, Homo sapiens
  misc_feature (1)...(520): n = A,T,C or G
actgagaactagaatgaaccgaagcattcccgtggaggttgatgaatcagaaccattcccgagtcaattgctgaaaccgatcccagaatactctccagaagaggaattggaaccacctgcccccaatacaaggaacatggcacccagcagcttgtctgtgctccagtgccctcccctgaaactggcaaaccaccagcctgtgtcacaacaggtcacctgcctgcgagctaaagtcctggaggaaggtgaagccagtttntttagaaggcaccctgaacttggcaaagatatttcctcatgttcctctggagccagcgagcctgagtctgagctcggagccctccctccagagcatcggttcacacttacggaaaaacgcaatagatggctgggatctcagctttcagcagcttctcctgacactggccatgaatcagacaaatcagacccaagtttacctaatgctttggcagactccttcagtggtggccaanagatgatgccccggccccggcatgat

SEQ ID NO: 467 - DNA, 520 bp, Homo sapiens
  misc_feature (1)...(520): n = A,T,C or G
gactgagaggacacatttgcgaagggtacagctggctcgatgcagccanggcctgcnagntggatgacncctgcaagangnncnggtncgnctacntcaccccgctgtaccaccagcatgtncaagtgancgtctgtgccgncgnaagtgccacaaagccctcaggcagttcttcgacaaagttccagccaagcacagctacngggatgctcttctgctcctgccgggacgtcgcctgcaccgagaggcggcgacagactatcgtccctgtgtgctcctatgaagaacgagagaggcccaactgcctgaatctgcaagactcctgcaagacaaattacatctgcagatctcgccttgcagatnnttntaccanctgccngccanagtcaaggtctgncaacaactgtnntaaggagaactacgcanactgtctnntggcctactggggactgattggnacagnaatgactnctanctacatatactccancagcctcagngtggcgccgtggagaaaaaa

SEQ ID NO: 468 - DNA, 520 bp, Homo sapiens
  misc_feature (1)...(520): n = A,T,C or G
gactgaggtggggtctttnaggtgtgcaccccaaatttcctgaaggagggaagatgtctcaatacctggatagcctgaagattggggatatggtggagttccgggggccgagcgggttgctcagttatgctgggaaagggaattttaatattcagcccaacaaaaaatctccacctgaactgcgagtggcgaagaaattgggaatgattgctggtgggacaggaatcaccccaatgctgcagctgatccgggccatcttgaaagtccctgaagatccaacccagtgctttctgctttttgccaaccagactgaaagggatataatcctgcgggaggacctagaggaacttcaggcccagtatcctaatcgctttaagctctggttcactctggactctcctccagaagactggacctacagcaagggctttgttacggctgacatgatccaggagcacctgcctgccccagcaanaggatgtgctgctgctgctctgtggaccaccacccattggtgcag

SEQ ID NO: 469 - DNA, 520 bp, Homo sapiens
actgaggaggtacagaagcattctgtacacacactggtgttcaggtcattgaagaggacccatgacatgtttgtggctgataatggaaaacctgtgcctttggatgaagagagtcacaagcggaaaatggcaatcaagcttcgcaatgagtatggtcctgtgctgcatatgcctacttcaaaagagaaccttaaggagaagggacctcagaacgcaacagactcatatcctcataagcagtatcccgccaaccaaggacaagatgttgagtatttggtgacaggcacccatccatacccaccaggacctggtgttgccttgactgctgatactaagatccagagaatgccaagtgagtcagctgcacagtccctcgctgtggcgttaccgtcccagaccagagttgatgcaaatcgtactgggcctgctggaagtgagtaccgacacccaggggcttctgaccgttcccagcccacagcaatgaattctattatggagaccggcaacactaagcaccagt

SEQ ID NO: 470 - DNA, 520 bp, Homo sapiens
  misc_feature (1)...(520): n = A,T,C or G
gactgagcgtatctgtgacccacagctgcananagctacttctcctgancacntcattttagttnctgagaagaaaatcctaataaggtgtgaagactgcagagaaggaagttcgaatgacaagtgcattggtgatgtgattgacaggccacagggcaccctgtgggagcgtcacccactggcctcatccccgggctaggcatgacctgaaccaggatggtataagaaaacgctgtctgtgtctacagaggccaactttgatattgncaactccttcaggtctnctnaacttgngccctaggacctggcgctaagatgtcttttcaaggtagagcccactgagtgctcccatctccctcctcccaatctgagtcccaaagtcgatttgggccactgaccttgagtcacatgcccagcggcttggtcctcctggttcggggtgtctccgatgcctgcttcttcggctggtccgaggcagcaaagggagaggacagaagggagactgttataaagaaaggac

SEQ ID NO: 471 - DNA, 519 bp, Homo sapiens
gactgagcacaacacacagtttcctctttggagcactggctgagttgctggacaacgcaagagatgccggggctgtaagactcgatgtgttttcagtggataatgaaacactgcagggaggattcatgttgtgtttcctggatgatggatgtggcatgagccctgatgaagcttcagacgtaatttactttggaacatccaagaaacgcttgtcgaccttgaagttcatcgggcaatatggtaaccgggcttaagagcggctccatgagaatcggcaaagactgtattcttttcacaaagaaggaagagaccatgacctgtctgttcttctctcagactttctgtgaaaaagaaggtctcactgaggttgtagttccaataccttcatggctaacgagaaccagagagagtatcacagatgacccgcagaagttcttcacagaattgtccatcattttcaagtactccccatttaaagaccgaagctgaattgatgcaagcagtttgatatgataaaaa

SEQ ID NO: 472 - DNA, 515 bp, Homo sapiens
  misc_feature (1)...(515): n = A,T,C or G
tcctggcagcagacacggcntcccanccatgagcggcttcaagccatcgntganaagcntangaagcaggcanagattgatgagcaagccggngacaacgtggaggatgaccgaanacagctgcagtaccttgaagtccaaggcactgagggaaccgcctggntgcctggaggggacaccatcctcagcctcanagggctgacnaggacatgaggaaacagatgcaggaggatgagcnnaaagcccggtgcctgnaggaatccatcaccaggctcgagaaagagatcnatgttctgnagtttggagagncagctcccanngtgcctcaaaggagaattcagcagcccccagcccaggccggccccagtntgcangcccagccaaggaggagcaaaagtcanaaaccttggtgaacgctcagcaggttttgtctgggtcnanncntggntgcctngcantngntctgtaaaccaggctgatctcgaangattagaccncggtcttctggattgttt

SEQ ID NO: 473 - DNA, 515 bp, Homo sapiens
  misc_feature (1)...(515): n = A,T,C or G
gaactgagagctgagnganangggagcagcatgaggccaagcggngggccancgttatcaannatgccaagatagagntngacntctgnnacaccgtcggtgctgaagcggncantnncgtaccctttggaccatcctggntgnnacnggaccaaatgtgggtgcccgtggagcagtacctggcncctcaatgancgncnctatggngnccnnacnggcctnantanggctgagacgggtgcnaagcacggaagaggagcangngaagatntggaggcgtttctttgacaccccaccaccanccatgggngagaagcacaactactacacctccatcagcaaggacccgccgctatgcaggcttgaagcctgaggagctgcctacctgtgaaagtctcaaggacaccattgcccgggccttgcccttctggaatgaggagatcgcacctaagattaaggctggccagagagtgcttattgcagcccatgggaacagccttcggggcattgtgaaa

SEQ ID NO: 474 - DNA, 515 bp, Homo sapiens
  misc_feature (1)...(515): n = A,T,C or G
atgaaatcggtgccgnacctgagccaggcacaggtggcccanaagctggccgtagaccccaagcctgctatccgcttccgtctagaggaggcagnaccagccttccaggacctggtatatggctggactcagcatgaagtggccagtgtggagggggacccagttatcctgaaaagtgacggctttcccacctaccacctagcctgtgtggtagatgaccaccacatgagcatcagccatgtgctgcggggctccgagtggctagtctncacctccaagcacctgctcctctaccaggccctgggctggcagccacctcgatttgctcatctgtccctgctcctcaacagggatggtagcaagctgtctaagaggcaaggggacattttcctggaacattttgctgccaccggttttctgccanaagccttgcttgacatcatcaccaactgtggttcggggtttgcagagaaccaaatgggcaggaccctgccggagctgattacacccctatt

SEQ ID NO: 475 - DNA, 515 bp, Homo sapiens
  misc_feature (1)...(515): n = A,T,C or G
gaactgagaagcagctgacgcaggatgatgacacggncgaggttgagattgccattgacaacacagccttcatggacgagttcttctctgagatcgaggaaacacggctcaacattgacaagatctcggagcatgnanaggaagctaagaaactctacagtatcattctctctgcaccggatcccagagccaaaaaccaangatgaccttgaacagctcacaacttgagatcaagaaaagggccaacaacgtncggaacaagctgaagagcatggagaagcacattgnggaagatgaggttctggncatctgcagaccttcggatacgaaagtcccagcactccgtcctctcccggaagtttgtggaggtgatgacaaagnacaatgaggctcaggnggacttccgngaacgcagcaaagggcgcatccaacggcagcttgnaattactggcaagaagacaacagatgaggagctggaagagatgttggagagtggcaacccagccatcttcact

SEQ ID NO: 476 - DNA, 514 bp, Homo sapiens
  misc_feature (1)...(514): n = A,T,C or G
gactgagaagtcctaggtgggggcagcgctgcgtgcgcaccggtgtcacattatcggactgttaaacatgtggactccagcgaggagagtctagattccgatgacgattgctctctttggaaacgcaagcagacagaagtgtcataatacatcctcccaagccagagcctttcccatttggaccaagtggncagaaaacggctctcaacggaggaaagaaggtgaacaacatctggggcgcggngctccaggaacagaatnaagatgcggtggccacctgaactnggcatcttgggaatggaaggctccattgacagaagcaggcagtctgagacctataactatttgcttgctaagaaacttgctaagaaggaatctcaagagtacacaaaaggaattagacaaagatctagatgaatatatgcatgggggacaaaaaaccagggtcaaanggaagacnaggaatggggcaaggncaccctcaagccggaaacgaccctgtcagagacaggac

SEQ ID NO: 477 - DNA, 513 bp, Homo sapiens
gactgaggtgggcgatggcggacggttatggagcttgcttgatcaacaagccagagcttgttcacgatatggtgagacaagtgagaaatcgggtggaaagcccaaggttttcagtttccattaagataaggatccacgatgacctggcaagaaccatagatctttgccggaaggctgaagcaacaggagtgtcctggattacagttcatggaaggacagttgaagaaagacaccagccagtccactacgatgccattaaaatgataaaggaaaatgtgtctatacccatagttgctaatggagacataagaagcttaaaagaagcagaaaatgtgtggcagatgactgggacagatggtgtgatggttgcaagaggacttttagcaaacccagctatgtttgctggatatgaagaaaccccactgaaatgtatctgggactgggttgacatctctcttgaacttggaactccttttatgtgcttccatcagcatctgatgtacatgatggaaa

SEQ ID NO: 478 - DNA, 513 bp, Homo sapiens
gactgagccctggctttcctggactggttctctagaccatgctagcgtcagactcacagagatccacctgccttaccaatcaagtgctgtgaactagagcttctggaatttctgagaatccctgctcaatacaagatggaccctgtggtcttgagttatatggacagtctattgcaggcaatcagatgtctcactattggaccctccaagctggctcaacgaccacattattgggtttgcctttgaatactttgccaatagtcagtttcatgactgctcagaccatgtctgtttcatcagccctgaagtcacccagttcattaagtgcaccagcagccctgcagaaattgccatgttccttgaacccctggatcttccccacaaaagagtggtatttttagccatcaatgataattctaaccaggcagccggaggtacccactggagtttgttggtttatctccaagataaaaatagcttctttcattatgattcccatagcaggagcaactg

SEQ ID NO: 479 - DNA, 512 bp, Homo sapiens
  misc_feature (1)...(512): n = A,T,C or G
actgaggtggggtctttnagtgaagcgagtatgaagctgccgcagcgcgaatcgaggccatggatcccgccactgtagaacagcaggaacactggtttgaaaaggccttgcgggacaagaaaggcttcatcatcaagcagatgaaggaggacggtgcctgtctatttcgggctgtagctgaccaggtgtatggagaccaggacatgcatgaggttgttcgaaagcattgcatggactatctgatgaagaacgctgattacttctccaactatgtcacagaagacttcaccacctatatcaaccggaagcggaaaaacaactgccatggcaaccacattgaaatgcaggctatggcagagatgtacaaccgtcctgtggaggtgtatcaatatagcacagaacctatcaacacattccatgggatccatcaaaatgaagatgaacccatccgtgtcagctaccaccggaatatccactataattcagtggtgaatcctaacaaggttgttcct

SEQ ID NO: 480 - DNA, 512 bp, Homo sapiens
ctgaggccctgtttgtgcttttcgtcctcgcctacatacacatcgtcttctcccggtcccccatcaactgcttagagcatgttcgagatcgatggccgcgggagggtgtcctgcgggtggaggtgcgccacaactcgagccgggcaccggtgatcctgcagttctgtgatgggggcctcggtggcctggagctggaacccgggggcctggagctggaggaggaggagctcacagtggagatgttcaccaacagctccatcaagtttgagctggacattgagcccaaggtgttcaagccacagagcggtgcagatgccctgaacgacagccaggacttcccttttcctgagacgccagcaaaagtgtggccacaggatgagtacattgtggagtactcactggaatatggcttcctgcggctatcccaagccacacgccagcgtctgagcattcctgtcatggtggtcaccctagaccccacgcgggaccagtgctttggggaccgtaaaaaa

SEQ ID NO: 481 - DNA, 512 bp, Homo sapiens
gactgagcttatgaaaattcccaaaaatgatcccttcaatgaagtccagaactttaacttctacttgtcaaacgtgggaagagataatcctcagggcagctttgactgcatccagcaaacactctctagctctggagcctcccagctcaattgcctgggatttatacaagataaaattacagtgtgtgcaacaaatgattcctatcagatgacgcgagaaagaatgacccaggcagaggaggaatcccgtaatcgaagcacaaaagttatcaaacccggtggaccatatgtagggaaaagagtgcaaattcgtaaagctcctcaagccatctcggacacagtgcctgagaggaaaaggtcaacgcccatgaaccctgcagaaagatgcatagtggcaacagtgtctctcagaggccatacagggacagggtcatccatttactggcactaaaagcctacaagaaacctgagctgcttgctcgactgcagaaagatggtgtcaatcaaaaaga

SEQ ID NO: 482 - DNA, 511 bp, Homo sapiens
  misc_feature (1)...(511): n = A,T,C or G
gaactgagaggcccccatggcgtgtggtccatggaggaacgcggcctggcccccaagtttgacaccaccttcgagaatgctcggccctcgaagacccacatggccctggttcagctagaacgcatgggcttcctcagcttcctggtcagccagaacgtagacgggctgcacgtgcgctcgggcttccccagggacaagctggcagagctgcacggaaacatgtttgtagaggaatgtcccaagtgtaagacgcagtacntcagagacacnggttgtgggcaccatgggcctcaaggccacaggccggctctgcaccgtggccaagaccaggggacttcgggcctgtagaggggagctgagagacaccattctggactgggaggactcgttgcctgaccgggacctgatgctcgctgatgaggccagcaggaccgcagacctgtctgtcaccctgggtacctcgctgcagatccgccccagtgggaacctgccccttgccactaagcgccga

SEQ ID NO: 483 - DNA, 511 bp, Homo sapiens
actgagtccatggaactgcggtccctggggagaaagtggccgttctcagggtctggagctcggtggtcaggagcctgagatttactacaactggcaacagccctctgggatgcacagcgatgcaaggccaggctctgacgggcatcctgcaactggctctccaattctcgcaccacaagtcgcatgtagccaaagctggctcgggacagtgccttcacccatgcctcttgggcagcctgcccatctgctgccagcaggtgtgggcgcactccaggggcatcaaagcgaatagcgaaggcgaactcctcgggtacaggagcctcggccagctccaccgtgcagccttccaataccacaagactcagcgggacccggctctctctagtctcgaaagagaatagcagattgcccttgagaacaaaccagtatcttcggccagtgccactgggagtgggtggggaacctggtcctccccaactacgcagaaagccagtgtggtctgccggagaat

SEQ ID NO: 484 - DNA, 510 bp, Homo sapiens
  misc_feature (1)...(510): n = A,T,C or G
gaggaccagtggccgcctgcaccacttgctgctggctcccctgtatacctggacctggcctacctgcctggtggtggtgccggccacctggaccagaacttcttcctgcgtgttcgtgcactctgctatgtcatcagtgggcaaggccagcgccaggaagagggcctgcaagctgtgcntggatgcacatgcttggctggcaagctggcagtgggaccttgacttgcaggtcacactgatccccaccttcgactctgcggtgatgcacaggtggtatgaggagacgcatgcgcagcaccaggcactgggcatcagggtgctgggcagtggcagcctggtgtccatgcaggacgaggccttccctgcctgcaaggtggagttctagccccacgctgcagggcagcctgggaacaacagttcctcactgtgacccaggttggcgctgtgactcnatgtgcaaagctagaccccgtgcttaagtgagccaccgtgtgacatcccagcttccat

SEQ ID NO: 485 - DNA, 510 bp, Homo sapiens
  misc_feature (1)...(510): n = A,T,C or G
gactgaggctatctttggcnccctgtgcccannctattcttcctacanggccgngangaccannancgtganggaatacgtaaaatggatgatgtattggatagtcttcgccttcttcaccacagctgagacacattacggatataatactgtcctggttccccttctactttgagcttcaagattgcctttgtgatatggctgttgtccccttacaccaagggctccagtgtcctctaccgcaagttcgtgcacccaacactgtccaacaaggaaaaggagatcgacgaatacatcacacaagctcgagacaagagctatgagacgatgatgagggtgggcaagaggggcctgaacctggctgccaatgctgcagtcacggctgctgccaagggccagggggtgctgtcggaaaagctgcggagcttcagcatgcaggacctgactctcattcnagatgaggatgcgttaccgctgcaggggccagatggccgcctccaacccggcctc

SEQ ID NO: 486 - DNA, 509 bp, Homo sapiens
  misc_feature (1)...(509): n = A,T,C or G
gactgaggtgggtttgggctgaggtagtancctgggcnaaaccngaanctggncnaatgnagagagatgnttgacttcttggactgcgnggnngacctnnnggggaaggaggnnaagcgngcagctcctaaatgaaccnggtggaatgtgtgggttgcacccggggtgtgcctcatnnntnccgnctacccngacatcatccgcatgatntnantnnatatcntccggaccctgccacccagcgagaaccctgagtttgaccctgaagaagatgagcccaaccttgagccctcgtggccacatctgcagctggtatatgagtttttcctgcgtttcttggagagtccagatttccagccctctgtggccaagagatacgtggatcaaaagtttgtcctaatgctcctggagctattngacagcgaggacccccgggaacgtgagtacctcaagaccatcttgcatcgggtgtacggcaagttcctgggtctccgggcctacatccgcaa

SEQ ID NO: 487 - DNA, 509 bp, Homo sapiens
  misc_feature (1)...(509): n = A,T,C or G
ccatgtggctggatctcatcctggcttntgtgctgggctntgtnatntactgnttngtctcccggtacaaggaggagaccttaccacttgnagatgggtggtggggcccagggtcanagccttcngccaaagaagatgagagcatccggcccttcaaggtggaaacatcagatgaggagatcaaggacttgcaccagaggatagataggttccgggcatccccacctttggagggcagtcgcttccactatggcttcaactccagctacctgaagaaagtggtgtccttctggaggaatgagtttgactggaggaagcaggtggagatcctcaaccaatacccacactttaagaccaagattgaagggctggacatccacttcatccacgtgaaacctccccagctgccctcaggccgcactccaaagcccttgctgatggtgcacggctggcctggctccttctatgagttctacaagattatcccactgctgacagaccccaagacc

SEQ ID NO: 488 - DNA, 509 bp, Homo sapiens
  misc_feature (1)...(509): n = A,T,C or G
gactgagcgccagccagagctcctcaaatttccatgccattcgtaccgactcaggccttatcctgnaatgggaagaagtgattcctgaggaccctggggaaggccccctaggaccttataagctgtcctgggtccaagaaaatggaacccaggatgagctgatggtggaaggnaccanggccaatctgaccgactgggatccccagaattgacctgattntncntgtgngngcctccaatgcanttggngatgggccctggagtcagccnctggtggngtcttctcatgaccatgcagggaggcagggccctccccacagccgcacatcctgggtgcctgtggtcctgggcgtgctcaccgccctgatcacagctgctgccttggccctcatcctgcttcggaagagacgcaaggagacgcgtttcgggcaagcctttgacagtgtcatggcccgaggggagccagctgtacacttccgggcagcccgatctttcaatcgagaaaggcc

SEQ ID NO: 489 - DNA, 507 bp, Homo sapiens
gaactgaggtacggcatccagaagcgaaggccgatgaggagaaaggcactacctcctaggacggagaagatggatactgatcaggactggcccagtgtttaccccactgccgcaccgtttaaaccctcagctgttcctctacctgttcgaatgggatacccagtaaagaagggtgtgcccatggcgaaggaagggaatctagagcttttaaagatcccaaattttctgcatttgactcctgtggcaattaaaaggcactgtgcagcgctgaaagatttctgcactgagtggccagctgcactcgacagtgatgagaaatgtgaggagcattttccagttgagattgatacagcggattatgtgtcatcgggaccatctattcgaaaccccaaagcccgagccgtaacgttaagggttaaactttccagtttgaatttagacaatcatgccaagaaaaaactcattaagcttgtaggagagcggtactgcaaggccaccgatgtgctc

SEQ ID NO: 490 - DNA, 506 bp, Homo sapiens
  misc_feature (1)...(506): n = A,T,C or G
gagactgaggcaccgnggagaaccnnccctcgggtacgctggtacttttacatggcgcggcttcatggagccatcgagcgcgaccccgcgcagcacgagagactgatcgcgcgcgtnaaggagatcctggcggcgggtagccagcgagcacctgtgacagacctcttggaccaggagatgcccctccccacccgcccagaaagaagctacaccttggggtctccaggcccccctcaaatgaaatctcanccgcatccntttagcttnnaaccccatcccaggttgcagagaccgggagacctgcctgcctcacagggagggtcacactacagngggtcaggaacagagganccaaggccggtggactcggataccccacccccacccctggtgctgancaggaggaccccaggtcgctcaccatacagccaggggacctgctgcgcaggcgctggctaacctggcagagccggggtaggggtgggggcagtccgacagccccttcc

SEQ ID NO: 491 - DNA, 506 bp, Homo sapiens
  misc_feature (1)...(506): n = A,T,C or G
gaggtggggtctttcaggctgatggtcctacgagtgcatgcctggctacctgagctgatgaccgcttgnccannanganngngacaatgtggnacttatctggaatgngggcacatgcatgaggagctgaacctgtctggncagctngcaccccgacctcatntacnnngngngctgncanccacantggcagcctnttttgntnagcttgcaaggacaagagcntccgaatcatcgatcctaggcggggcaccctggtggcagaacgtgaaaaggctcacgaggnggcccggnccatgcgggccatctttntagcctgacggggaaggtgttcaccncaggtttcagccgcatgagtgaacggcagntgnngctctgnatacccagaaaaccttgaggagcccatggccctgcaggagctggattcaagcaanggggctntactgcccttttatgacccagacaccagcnntggtctatgtctgtgncaaggcccgattccagca

SEQ ID NO: 492 - DNA, 506 bp, Homo sapiens
  misc_feature (1)...(506): n = A,T,C or G
gaggaatcctcaacttctgtgccantaactacctgggcctgagcagccaccctgcagtgatccaggcaggtctgcagactctggaggagtttggagctggactcagntctactcgatttatctgtgggacccagagcatccataagaatctagaagccaagatagcccacttttcaccagcgtgaggacgccatcctctatcccagctgtttcgatgccaacgctggcctatttgaggctttgctgaccccagaggatgcggttctgtcagatgagctgaaccatgcttccatcattgacggcatccgactgtgcaaggcccacaagtaccgttaccgccacctggacatggctgacctggaagccaagctgaaggaggctcagaagcacaggctgcgcctggtggccacagatggagctttctccatggatggtgacatcgctcccctacaggacatctgccgccttgccgcccaatatggtgccctggtctttgtggatgaatg

SEQ ID NO: 493 - DNA, 505 bp, Homo sapiens
  misc_feature (1)...(505): n = A,T,C or G
cttagagaatttactttgtttacctgtgngagaaaatcatagctgagagacattttgatcatntacgtgcaaaaaaaatactaagtagagaagacacagaagaaatttcttgccgaacttcaagtagaaaacgggctgggaagttgttagactacttacaggagaaccccaggggcctggacaccctggtggaatccatccgcagggagaaaacacagagcttnctgattcagaagataacggatgaggtgctaaagcttcggaatataaaactggagcacctcaaaggcctgaagtgcagcagctgtgagccctttgcagccggagccaccaacaacctctctaggtgcaattccgatgagagcaatctctctgagaaacagagagcatccactgtcatgtaccacccggagggagagtccagcacggctcccttcttctctatggcgtcgtccctgaacttgccagtcctggaagttggcaggactgaaaacagcagcttaag

SEQ ID NO: 494 - DNA, 504 bp, Homo sapiens
  misc_feature (1)...(504): n = A,T,C or G
gactgaggacaagaaggacttcgttgacttgcgggtgaaacgtcttctgaaggcaggtgtcatatctgcactggcctgcatggtgaaggcagacagtgccatcctcacagaccagaccaaggagctgctggccagggtattcctggcactctgtgacaatccaaaggaccggggcaccattgtagctcaaggtggtggcaaggccttnatcccccnggntntgnngggcacananganggcnaggtganggcancncatgggctagccaagatngctgctgnctctaacccgnacattgccttccctggggagagggtatatgaggtggtgcggcccctcgtgggtctcctggacacacagagggatgggcttnanaactatgaggntctgctgggactgactaacctgtctgggcgcagtgacaaactcaggcagaagatcttcaaggagaaggcccttgccagacattgaaaactacatgtttgagaaccatgaccagctaa

SEQ ID NO: 495 - DNA, 504 bp, Homo sapiens
actgaggtggggtctttcacgctgcctctcctcaggaccagaccgtgacgatgcatcatcccaagccttgcaggttccaaaacgcctttctcctccgctgtatctcgtgacttggctgtcgccccacagtgtaaaagctgtcgtcgccgccgcctccactttacagacaggaaagctgaggtcctgagaagcgaggcaagtgcatccgactcaaggctacacgcatttaggagaccacagcacacaaatcagtgataatgacagaccctgtgttggcatcccagctggctaatggcactggggagatggatggactgtgctctgaactattgttgattcccccacctctctcaaaccatggaatcctgggccctgtccagaatacctgtgcttctggggagcttgcacctttgcctgctgacccaggctgcctgctggtagaggccacagctactgaagagggtccagggaacatggagatcattgtggaagcagtaactggaa

SEQ ID NO: 496 - DNA, 504 bp, Homo sapiens
  misc_feature (1)...(504): n = A,T,C or G
aaaatgagtgtgaatgncagttggggctaaaggaaatgctggaacggcttaacaaggaagccgatgaagccttattgcgtaacctgcaccttcagttggaggcacagtttctgcaggcagatatcagtgtggccaaggacaggtncangaagaatcttctggagattcagacctacatcaccgtcctgcagcagatcgtacagactgctcctcaagtgtncntggttacntgggatgagggaggagaagctgtttcacagaacggnaagtggntgccctgcagaaccanctngaggagggncgagaggcantcacccacctgcaggcacagaaagctgagctgnaggcccagaccacggccctggaacaagctattaagcatgctcatgagtgttacgatgaggagctacagctttacaacgagcagatcgaaaaccttcngaaggagatcgaggaggcggagcgnnctctggagaggtcgacctatgactgcaggcagactag

SEQ ID NO: 497 - DNA, 504 bp, Homo sapiens
gactgaggatggccgggccgatgtggttgcaaatgatgcaggggatagagtcacaccagccattgttgcttactcggaacgtgaacaggtggttggactggcagcaaaacaaagtagaataagacatgtttcaagcacagtagtgaaagtgaaacagatccttggcagaagctctgcagatccacaagctcagaaatacatctcagaaagtaaatgcttagtcattgagaaaaatgggaagttgcggtatgaaatagatacaggagaagaaacaaaacttgttaatccagaagatgttgccagactgatatttcagtaaaatgaaagaaacagcgcattctgtcctgggctcagatgcaaatgacgtggttgtcactgtcccatttgactttggagaaaagcagaagtctgctctgggggaggcggctggagctgctggatttaacgtgctgcggctgatccatgagccgtctgcagctctccttgcttatgggattggtattt

SEQ ID NO: 498 - DNA, 504 bp, Homo sapiens
actgagagcacttctggtgagattggaaggcatgcagccatcctgttgtcatgaagggcctgtgtgccgagtgtggccaggacctgacccagctgcagagtaaaaatggaaggcagcaggtccccctttccacagcgacggtttccatggtgcacagtgtgccggagttgatggtgagctctgaggtgagcagaggactctggagcgtggattgataggcagccccatctgaatactgactgcttcctaagatgtagctccgctggctgcccgtttccttttttccgttcataaacaactgtctctccatggatgcttggaagccccacagctcttagttttgtagattagtcaccttcttggtactgctgacacagcagcaggggtggcctgcattccccttgagccagactttccttagaaatgctgtgacaggctcctaacaggaagcagtgctatggctaggaacttgtttgtgctcttttcttaataaaattgaattgg

SEQ ID NO: 499 - DNA, 504 bp, Homo sapiens
  misc_feature (1)...(504): n = A,T,C or G
cgctggggggatcccaggggcctgagttccaggaatttctgctgacgaagttgatcaatgccgagtatgcggtgttacaaagcagagaagtttgccaaactggaggagcaggacgcgtgcccgcccttcttgagactgctctacgaggagcctccatattcacagccagtccatgatgggcctcggcggccgacgacgacaagatggagaacggcagcggngggggtggcttnttcgagtntttcaagagggtcatccggagccggagtcagtccatggatgccatgggactgagcaacaagaaacccaacaccgtgtcaacctagccacagngggagcttcacccccaacaaccctgacctggccaaggcagccggcatatccctgattgtccctggaaaaagccccacaaggaanaagtctggtccgtttggctcacgccgcagcagtgccattggcatcgagaacatccaggaggttcaggagaagagggagagccctatt

SEQ ID NO: 500 - DNA, 504 bp, Homo sapiens
  misc_feature (1)...(504): n = A,T,C or G
gactgagatgatgtttttctgcctaagnatcgacctggncagtgtggatatggatgagactgagcgggaggtggagtatttcaaaagattctgcttggactctgcaagacagaaccgacaaagactatccatcaactggtccaactttagcttgaagaaagccacctttgctgcccactgaatgaggactgcctggagagggatgtgtgggaggcagctgggctgcgccactcaagagccaagcccctcactggctcccctaagcttcagtacccacccagggtgtgtagggcgggatgctgtggcctgataccccgagaccgagaacttgctgctcgacctgcgttgttagcttgtgtgcgtgtagtctgtgagtgagacttctttgattgtagctctgtgctgtcggaatggaacagtagttcccgccaattcctccaccaccacggcctcagaggcctgggccgtggccagagacgagtttgcatcatccacgtggctctg

SEQ ID NO: 501 - DNA, 504 bp, Homo sapiens
  misc_feature (1)...(504): n = A,T,C or G
tgaggtggggtctttcagtggcagtggtagcggagtaaatcctttcctcagtgattcggatgaggacgacgacnaggtagcaggcnaccgaggaccggcgggcaggacttcggctgggtgccggggtcggnctagatcctggttctgcaggctccctgtcgccacaggaccccatggccctgggaagcagcgcgcggccggggctcgctgtggagatgtccgccgccccggcggctccggggggcatcggggagacccctgcccgattgtcaatcgatgccatcgccgctcagctgttgcgcgatcaatacttgctgaccgccctggagctgcacacctgagctgttggagagcggccgcgagctaccacgactgcgcgattacttctccaatcctggcaacttcgagaggcagagtgggacccccccagggatgggggcgcccgggatccctggcgcctccatcgtcggaggcgctggaggtcgggaaccgagtacgacgtcc

SEQ ID NO: 502 - DNA, 504 bp, Homo sapiens
  misc_feature (1)...(504): n = A,T,C or G
actgagaattagcatttggctaaaccaagcacttaaaggagtccgagatagccatgggaatgtgatagaaaatgctcatcttctcacattattccaccggctctgcaaactcttgttttttcgtatccgccctatttttgtatttgatggtgatgctccgctgctaaagaaacagaccttggcaaagagaaggcagaggaaggattctgcatccattgactcgagaaaaaccaccgagaaacttctgaaaacctttctgaagagacaggctctgaaaactgctttcagaagctcaagacatgaagcgccacccagtctcactcaggttcaaagacaggatgacatctatgttttgccacctttaccagaggaagaaaaacacagttcanaagaggaagatgaaaagcaatggcaagcaagaatggatcaaaaacaagcattgcaggnactcacataacatgggaattcacaaccggctgttgttacttgaaatgatgaaaataa

SEQ ID NO: 503 - DNA, 503 bp, Homo sapiens
  misc_feature (1)...(503): n = A,T,C or G
actgagatttggtgctgaggaaggncccagngnctccttgaacaactaagacaagtcaggatggtttcaatcccagaatactacgaggggaagaatatccttctcacaggagccactggtttcttaggcaaggtgcttctggaaaagttgctgagatcttgtcccagggtgaattctgtctatgttttggtgaggcaaaaagctggtcagacaccccaagagcgagtggaggaaatcctcagtagcaagcttttcgacaggttgagagatgaaaatccagattttagagagaaaattatagcgatcaacagtgaacttacccaacctaaactggctctcagtgaagaagataaggagatcattatagattctacaaatgtcatattccactgtgcggctactgtaagatttaatgaaaatttaagagatgctgtccagttaaatgtgatagctacacgacagcttattctccttgcacagcaaatgaagaatctggaagtgcg

SEQ ID NO: 504 - DNA, 503 bp, Homo sapiens
  misc_feature (1)...(503): n = A,T,C or G
aactgaggagcagagncaacgccagtgcctctgggagcagggatgagacgcaccagcacagagtcacagcgacctgtcgccttgcatggaacagtgtggggcttgccaatcttgttcccccaatagcctctccacacagggatgatggaaaccttggccaaggtgatggcttctcagatggcagtggcaacctccttggagcacttaatgccaagaccaacgtgaccattgtagtccccaatagggacgaaagccttgaacctggtccgctggccagcccgagtctgcttctgcactggcatgattttcagaacctcatcctttagggatgcactcaggaaaaagtcaatgatctcagtcagactccttgatgggcagggagaacaggtagatctcccccaaggacttggtcttcatgtnccttaaaccaggtggccccagcttgncgacaggganccactttgttgnctttcagcntttacctccncgagccccgaggccta

SEQ ID NO: 505 - DNA, 503 bp, Homo sapiens
  misc_feature (1)...(503): n = A,T,C or G
gactgagggcccaaagctcccgggctgtggggctccgccccgcgccggcgaggccccacccactctgcagtcagtattgtccgacggtacccagcgtccctcggcagtttccggcagtaatcgagagtttctaacgtgccccgcctccgccaccccccttctctcggcctcggtcctctctaccgccgcccggctcgctgtccccgtgcntccctcccgtcctcggccctccgccccttccctccccacctcgcctggccctgcaggcgcctcaggcggtacgggctgggcaagatggcggctttcgggatcttgagctatgaacaccgacccctgaagcggctgcggctggggcctcccgatgtgtaccctcaagatcccaaacagaaggaggatgaactgacggctttgaatgtaaaacaaggtttcaataaccagcctgctgtctctggggacgaacatggcagtgccaagaacgtcaacttcaatcctgccaagatcag

SEQ ID NO: 506 - DNA, 502 bp, Homo sapiens
gactgagcagtgtgatgacaatagttaagtccaggccttttcgggaaaagcaagggaagatcctactggaaggtcgcaggctgattgcagatgctctcaaggctggagctgtgcccaaagcgttcttttttagccgtctggagtatgtcaaggagttgccggtagacaagctgaaagacgtcagcctcattaaggtgaaatttgaagacatcaaggattggtcggacctagtaacgccacaaggaataatggggatttttgccaaacctgaccctgttaagatgacatatccagagactctgcttcaccatacactgcccctagtgttgatttgtgacaatctccgtgaccctgggaacctggggacaatcctgagatctgcagctggagcaggctgcagtaaagtcttactcaccaaaggctgtgtggatgcctgggagcctaaagtgctccgggcaggcatgggggcacatttccaggtacccattgtgaacaatgtgga

SEQ ID NO: 507 - DNA, 501 bp, Homo sapiens
gaggacctgtatcaagtgcaacaaaggtatctatgggcagagcaatgcctgccaggccctggacagcctctaccacacccagtgctttgtctgctgctcctgtggacgaactttgcggtgcaaggctttctacagcgtcaatggctctgtctactgtgaggaagactatctgttttcagggtttcaggaggcagctgagaagtgctgtgtctgtggccacttgattctagagaagatcctccaggccatggggaagtcctatcacccgggctgcttccgatgcatcgtatgtaacaagtgcctggacggcgtccccttcactgtggacttctccaaccaggtgtactgtgttaccgactaccacaaaaattacgccccgaaatgtgcagcctgcggacaacccatcctcccctcagagggctgtgaggacattgtgagggtgatatccatggaccgtgattatcactttgagtgctaccactgtgaggactgccgaaaaaa

SEQ ID NO: 508 - DNA, 501 bp, Homo sapiens
  misc_feature (1)...(501): n = A,T,C or G
actgaggtaccctgggtcccattcatggntcacgtgctgcgctaccaggacactccaggagtcaagatgatcgtagttcttggggagatagggggcacagaggaatataagatctgccggggcatcaaggagggccgcctcaccaagccagtggtctgctggtgtatcgggacctgtgccaccatgttctcctccgaggtccagtttggccatgctggagcttgtgccaaccaggcttctgaaactgcagtagccaagaaccaggccttgaaggaagcaggagtgtttgtgccccgaagcttcgatgagcttggagaaatcattcagtctgtgtatgaagatctggtggccaaaggagccattgtacctgcccaggaagtgccacctccaacagtgcccatggactactcttgggccagagagctgggtttgatccgaaaacctgcctcattcatgaccagcatctgtgatgagcgagggcaggagctcatttatgcgggc

SEQ ID NO: 509 - DNA, 501 bp, Homo sapiens
  misc_feature (1)...(501): n = A,T,C or G
actgaggtgggtccgncctactcagctctgtgtccccgtcctctgctcctgctctcaaggcttggtttgggttcccccacttcattttccctatcgctaacttgaatagaaggtcgtttgaagaagtacttaaaaatgaaacggagaagntttctggaaactttctgtgcgggctgcaaggtaaaacaacaacacaaagcactgcagatctgcctcagagccacaccagagaggctggctcctgcggttaagtgtctttggcaagttttggaggaaatctccctctggctgcaagcaatacagaaaggcttccggagtgatgggagagagcagagaggaaggctgacgagaaaactctgaattctgacagagtcctcactagccattctgaaaaacgcaccctcaaactgtgccgggtcttcgggaaccctgactcaccgtaggtcgcagctactcctccttaagtcagtcttggctgtccaggttggctgcttggtgacc

SEQ ID NO: 510 - DNA, 500 bp, Homo sapiens
  misc_feature (1)...(500): n = A,T,C or G
cctgcctccccttttgcctganaananaagccagactgaaaagattgagaagcacggactcnaaccagttccaaaactcctgtagaactgaacggtctttgtaatggcagacagcagctacaagcccatcgnggaatncattgatgctcagnttgaggcctacctacaagaggagctgaanatccgaanagtacgtgcactcctaccatgactcccgaatnntttgtctgcttgtatttcattgccccgacaggacattcggttaagtctctggacctagtgaccatgaagaagctggatagtaaggtatgagacaactgctggggctccacaggctggactcttcctcatctaatacacaatggctcctggattccagtagaggtcttatggaatcctaatccaattctttgttaccgtccttcataaagatgatattacagatgcctgcatttgggtcatatgctgtgtcatctggattccnagtattagggatggat

SEQ ID NO: 511 - DNA, 499 bp, Homo sapiens
acatggctgggcctgagaagcagtccacagagggtgtgacaaccatcctccctttgttggtgggaagtctgtgctcctctttggacagagccagtatacagcggatgaataccaggccatccagaaagctctgagacagagactgggtccagagtacattagcagccgcatggctggaggaggtcagaaggtgtgttatattgaaggtcatcgggtaattaatctggccaatgagatgtttggttacaatggctgggcacactccatcacccagcaaaatgtggattttgttgacctcaacaatggcaagttctacgtgggagtctgtgcatttgtaaaggtgcagttaaaggatggttcctatcatgaggacgtgggctatggagttagtgagggcctccgttcaaaggccttgtcactggagaaggccaggaaggaggctgtgactgatgggctgaagcgagcactcaggagttttgggaatgcacttggaaactgt

SEQ ID NO: 512 - DNA, 495 bp, Homo sapiens
  misc_feature (1)...(495): n = A,T,C or G
ggttggatccggcttgnggactnttctngaanaattgncngctgtccttttctaatccgggngnatttagatgcctccgaagacaaggacagcncctttcggtaatgncaatccaatttttctgagccacttaatgggtgtactatgcagttaccgactgctgccagtggaacatcccaaaatgcttatggacaagattctccatcttgttacattccactgcggagactacaggattttggcctccatgatcaatgtagaatatttaaggtgggtctgctgatggatcagaatcctttcaagacccctgcaaaaaagtgattcaagagcctcagtccgccaattggtttgcacttcccttgagtcctggggggccaacagcacttgctatgaaacaggagccccactttgtaataactccccccgaactccaggttaagaggtaacaaaagacgaccaagaatggcttttctgcactttgagaattttactggg

SEQ ID NO: 513 - DNA, 495 bp, Homo sapiens
  misc_feature (1)...(495): n = A,T,C or G
tgagagcactcggcttgaggagacctagggtttgttcaaggtgacacactgcagcaaatatgagttaagaattcgaatccaaagtaacatcctccccgctgcgccatagccggggctcctaaaacggaggtccggcgccgggaaactaatgacccatggcatctccctcagcgcagtgccacagctgggaacgcaagcctatcctcgtgactcccgaatctttccgttttcacacaagtgcgtgactgcgggagcgaggtggccacagtgagatccctccaccctctccgggcgaggtacagatcgggtccggccaagggcaagtctcagcacacccgctcttccgcgtcgccaccgagctgacccgggcccgcgtgggagaaactcggaacgaccttggtggcggcctcagtccccgcgtgtctgggcgagactcccccacagtccccgcccgcagncacccggcgtggccagcgcagacaggataacccgggt

SEQ ID NO: 514 - DNA, 495 bp, Homo sapiens
gactgagggatgacgatcaggaagatggcttctgccagccgtaccgagggatcgcttgtgcgcgcttcattgggaaccggactatttatgtggactccctccagatgcagggggagattgaaaaccgaatcacagctgccttcaccatgatcggcacctccacgcaactgtcagaccagtgttcacagtttgccatcccatccttctgccacttcgtcttccctctgtgcgacgcacgctcccgggcgcccaagcctcgggaactgtgccgggatgaatgtgaggtgctggagaacgacctgtgccgccaggagtacaccatcgcccgctccaacccgctcatcctcatgcggctccagctgcccaagtgcgaagcgctgcccatgcccgagagcccggatgctgcgaactgcatgcgcatcgggatcccggcggagaggctgggtcgctaccaccagtgctacaacggctctggcgccgattacagggggatgg

SEQ ID NO: 515 - DNA, 495 bp, Homo sapiens
  misc_feature (1)...(495): n = A,T,C or G
gactgaggggggaggggtgtgaggtatagccnagnctgaggccannntnntttnttggggnctttnagngnattngtngnaccgcngcctactgctgananctgaggagncnntnangngcanctttatactgnnccntagtattnaatannggncaannggagncncnncggctnccntcatagcctagccgtgcgcatcnttngacctacgagccgttggannagaagctnccctgtggcaaagcatgacatcaccagagaaggaaacaggcaaaggagttttctccttacagtgaaaactccctagagcctaacaggaccgcagctgagacaggcggaaggcagcgagacctaccgaaatggcttttctcctgtatgggtccgaatgtgcttccgcaggtcactgagtgtggtgaagtatttgctgcagccttgagattcacagttaaacgttttccctgtgtgaagcctctgatgtgctttcaacctgcaa

SEQ ID NO: 516 - DNA, 494 bp, Homo sapiens
  misc_feature (1)...(494): n = A,T,C or G
cattggtctcacagcaccagcagttattggagatgtccttcaggtctncagtgggtctgaagggagagctattatcttctgtgaaactaagaagaatgttactngaaatggccatgaatccacacataaagcagaatgctcagtgtttgcatggagacattgcacagtcacaaagagaaattaccttgaaaggccttcagagaaggtnnttttaaagttttggtagcaaccaatgtggctgctcgtggcttggacattcctgaggttgacctagngattcagagttctcctccacaggangttgaatcctatatccatcgctctggacgcacaggtagagctggcncggacaggaatntgtgtatgtttttatcaaccaagggaaagaggtcaactgagatatgtggagcagaaagctggaattaccttnnaaacgtgtaggtgttccgtctacaanggatttagntaaatctnaaagcatggatgccatcagg

SEQ ID NO: 517 - DNA, 494 bp, Homo sapiens
  misc_feature (1)...(494): n = A,T,C or G
gaggggtatgcccagcgcagagncagagttcctactgattcagatattcgggcgcaaaagttaccccatgctcaagttcctgcggatgaagctgtggttcacccgattcaagaatatcaacccctacccagtgccccgagatcttccccaggaccctttggacctggccaagctaggcctgcgacacatggagcctgacctcagtgctaaggtcactgtctaccagatgtctttgcccagtgactcgacaggcatggaagatcccacacagcctcacattgtaggaatccagagtccagatcagcaagctgccctggcccgccacaacccatccaggcctgtttttgttgagggccccttccctctctggcttcgtaataagtgtgtctactatcacatcctaagagctgacctgccacctcctgaggaagagaaagtagaggagatcccagaagaatgggagctgtactacccacagaagctggacctggaat

SEQ ID NO: 518 - DNA, 493 bp, Homo sapiens
  misc_feature (1)...(493): n = A,T,C or G
gactgaggtttgctggttggctcctgngcagncagcaggaaagaagaaaccctttgtctatacccagggtcaggccggtcttaaaccgagcctttttcccttgctttgacactccagcagtgaaatgcaccgtattcggctcttattgaggttccagatggcttcacagctgtgatgagtgcagacacctgggagaagagaggaccaaataagttcttcttccagatgagccatcccatcccctcctatctgatagctttggccattggagatctggcttcagctgaggttggacccaggagccgggtgtgggctggagccctgcctgattgaagctgccaaggaggaatacagtggggtcatagaagaatttctggcaacaggagagaagcttttcggaccctatgtttggngaaggtatgacttgctctttatgccaccgtnctttccatttggaggaatggaaaatncttgcctgacctttgacactccg

SEQ ID NO: 519 - DNA, 492 bp, Homo sapiens
actgagataatttcctcatcttcatccgcatccttggcatccttgtttcaaagctgaggacacggcagatgcgctgccccgactaccgactaaggctggctcgctccacgctgacactggtgcccctgctgggtgtccacgaggtggtgtttgcgcctgtgacggaggaacaggttgaaggctccctgcgcttcgccaaactggcctttgaaatcttcctaagttccttccagggtttcctggtgagcgtgctctactgcttcatcaacaaagaggtaggagaggctagcccgcccgtgccccctggcggccaccctgggaacagcgtcaccttgagcgcccggcgttgcaggtgcagtcggagatccgccagggttggcgccaccgccgcctgcgtctcagccttcaagagcagcgtccacgtccgcaccaggaactcgccccccgggctgtgcctttgagctctgcgtgccgagaagctgccgttggcaa

SEQ ID NO: 520 - DNA, 491 bp, Homo sapiens
  misc_feature (1)...(491): n = A,T,C or G
gagggccaggttgtaggtatatgccgctacacccaggncggctgactcttaanccatggagaaagacattttgtggattcagagcttttctttagaaactgtttttctttttaatttaccacattaaccaaaaggtggttggttttctggaaccaaacaatgtaagatggcctcgaaaggcctgcctccttataacacaaaagccaaagagacaaacacagaaatccgtctggcctcagttctttccagagaagactaagcacaggctttaacacagacgactcggcagacagtggctggcaatgcccttcccccttcaaacagngtgacacggtgtgacaccactcctgacacactgtncacaccacccgcccttcctcagncacaagcacgtacccaacccatctgaatgaaggaactgagccgtttgtgaactgttgggatggggaggngacaaagactgcctncccagataaaggacacagtcccca

SEQ ID NO: 521 - DNA, 491 bp, Homo sapiens
  misc_feature (1)...(491): n = A,T,C or G
tgaggactctggctggagnttcgaatctgcntcaccttcccgaccgaatacgtgaagacgcagctgcagctagatgaacgagcgaacccaccgcggtaccggggcatcggagactgcgtgcggcaaactgtccgcagccatggcagtcctgggcctgtaccgcggcctcagctccttgctctacggctccatccccaaggcggctgtcaggtttgggatgttcgagttcctcagcaaccacatgcgggatgcccaaggtaggctcgacagcaggagaggactattgtgcggtctgggtgccggcgtggcagaagcagtggtagtcgtgtgccctatggagaccatcaaggtgaagttcatccatgaccagacttnctccanccccaagtaccgaggatttttccacggggttagagagattattcgggaacaagggctnaagggaacataccaaggncttactgcgactgtnctgaagcagggctcaaacc

SEQ ID NO: 522 - DNA, 491 bp, Homo sapiens
tgctaattccactttcaatgaagaattgcttccgattactttgtcagcacaaggtcccagcagctggctttaaaagcccacccacacatgggctcattttacagtcgatctccaatgatgtatatgaaaatctggcttttgaagactggatccacgaccacatacatctagaaggcaagccgattcttttcctttggagaaattctccttctgtcgtcatcggcaggcatcagaatccgtggcaggaatgtaacctccatctgatgagacaggaaggaatcaaactggctcggaggaagagtggaggaggagccgtgtaccacgacatgggtaacatcaacctcaccttctttaccaccaaaaccaagtatgacagaatggaaaatctgaaactaatcgtgagagctctgaatgctgtccaaccccagctggatgtgcagcctaccaaaaagtttgacctgctactcgacgggcagtttaaaattgaactg

SEQ ID NO: 523 - DNA, 491 bp, Homo sapiens
actgagccatcctgagacaaaagaacattttaattcactgcacattcccaaagccttgcagaaggctctgccatttaagaacaaacccaagactcaagcaaaggcaggcaaagtgccgagggacaggcagagaccggccgtcatacgtgaacctcatgagaggaaggtcctggctctgctagatgcctctgagcacaatacacagtcagaaaatgaaaaaggccaaagagcagagacgcctgcacaacaaggagcatgtgaagatgaagcagaaggaggaagaggacaagctgaggcggcagaaggacctgaggaagaagctcttccggatgcagggtcagaaggaaaaacgaagtcagaagtctagtctgagaggagctgaggatacctgaatggagggggggtcttccagagctgcagccgtgatggcttcagtgcttgtgacaagtcatgacgagagcttgtggagactctgggatgtgtggtcccgc

SEQ ID NO: 524 - DNA, 489 bp, Homo sapiens
  misc_feature (1)...(489): n = A,T,C or G
tagaactctgtatgtgggggttcggatgccgctggggaggcagagccatcggcaccaccgcactcatggccagaagcaccggagacgaggagggcggggcaaaggagccagccagggcgaggagggcttggaagccttggcccatgacaccccgtctcagcgtgttcagttcattcttggcactgaggaagatgaagaacatgtgcctcatgagctcttcacagagctggacgagatctgtatgaaagagggggaagatgctgagtggaaggagacggccaggtggctgaagtttgaanaggntgnngangacggngganagcgctggagccagccttacntggccacnctctctntgcacagnctgtttganctgaggagctgccttatcaacgnctctgngnttctggacatgcgtgcacnnngcatagagnngatctcagacctgatcctggaccaacangagctgctncgagacctgagcgacag

SEQ ID NO: 525 - DNA, 488 bp, Homo sapiens
  misc_feature (1)...(488): n = A,T,C or G
actgaggtcagatgctgaattatcagggncactttcacttgttctgacacagtgctgcaaaagaataaaggacactgtccagaagttggcctctgaccacaaagacatccatagcagtgtttctcgagttggaaaagccattgataagaattttgattctgacattagcagtgtgggaatagatggctgctggcaggcagacagccaacggcttctcaatgaggtcatggtggaacacttcttccgacaaggaatgctggatgtagctgaggagctttgccaggaatctggtctgtctgtagacccaagtcagaaagaaccatttgtggagttaaatagaatattagaagcattaaaagtcagagttctaaggcctgctctcgantggncataancaaaccgagaaatgctcntagcccanancagttccttngaatttaaacntacaccgnctgtnttttattancttgttaatgggctggaactac

SEQ ID NO: 526 - DNA, 488 bp, Homo sapiens
  misc_feature (1)...(488): n = A,T,C or G
agcccagcactggggngccctcctctcgccgctccagagctnccagagccgtcagctcaggncagccagccgcgcgcacagcgccctgaagtctgcacacgcgggaccccgagacgccccctccgggagggcatcgtacctgcggcggggcacgcgtcagtgcggagtccctctgcgtccgcgtccccaggcgagtgcgcccttcccgtacccccaggccacaccaccgaatcttttaccccagtgtcataaggtcacccgctaccatggccccatccatggcaactccgtctgcggacccggtgcgcgcgcccccttccgccagggaaaggctccgccccctcttccctccgcctcctctctcccgctgctatccaaccatattctcgtgcgaaggcgcttccacgcttctattggcttggtcgcgcgccacgcgcacccttcaggtaacttgtccagtgtaaattttatagcttgaggttggtttt

SEQ ID NO: 527 - DNA, 486 bp, Homo sapiens; identical to SEQ ID NO: 23

SEQ ID NO: 528 - DNA, 485 bp, Homo sapiens
  misc_feature (1)...(485): n = A,T,C or G
gaagaggcttcagcaggcagnaagcacactnntgancgaactcnacatgtgtcanntgtgagtnggcngannanncnncactgtgcgtncatagngaccatttnngtagnatancgngcatangatgggacttantngagggangcntncangaagaaccacatgtactcctgcaggtttagccngacaatgtgtggtagacaaagataagaggaaccagtgtcgntacttgcaggcttaagaagngcttccgggctggcatgaagaaggaagctgtccaaaatgagcgggaccnggatcagcacgccggaggncaagctacgaggacagcagcctgccctccatcaacgcgctcctgcaggcagaggttctgtcccagcagancacctctcccatctctgggatcaatggcgacattcgggcaaagaagantgccaacatcacagacgtgtgngagtctatgaaggagcagctgctgggcctgg

SEQ ID NO: 529 - DNA, 484 bp, Homo sapiens; identical to SEQ ID NO: 24

SEQ ID NO: 530 - DNA, 482 bp, Homo sapiens
  misc_feature (1)...(482): n = A,T,C or G
ccactattaaagagctgaaagaaaacatcatgagtatttcttccttaggaagtattgggaaagggagaactgtaccatctggtgaagaggagcgcaataatatcctaagacagatgaaagtaccggactacactaaagggtgaccagagctggatcaccaagcatgatgactctgaggatcataccatagagccactctcacgtcacaaccgagccacatccttctcatcagtcagagacgaatcaaatgccaggtctccaaacgcaagggctccagctggttacataatccggggagtgttcacccgaacaatagatagctcttctcactcccagcatcgcccctctaagaccaacggagctccaagaagtgcttctgggcagctgggancagctaattttggtcatcctcttcagtcgtctggctataagatgacnacggnagattatnagaaactagcaccgcacaacataaggcgcag

SEQ ID NO: 531 - DNA, 481 bp, Homo sapiens
tgaggttgctccgaggagatgccgtggtggagctgggcttcaacgattacctagacatcttctgcccacattatgaaagcccagggcccccagaaggcccggaaacctttgcattatacatggtggactggtcaggctacgaggcctgcacggcagagggggcaaatgccttccagcgctggaattgctcgatgccttttgcccctttcagccctgttcgattctcagaaaagattcagcgctacacacccttcccgctgggctttgagttcttgcctggagagacttactactacatctcggtgccgactccggagagtcctggccggtgcctgagactccaggtgtctgtctgctgcaaggagagcgggtcatcacatgagtcagctcatcctgttgggagtcctggagaaagcggtacgtccgggtggcggggaggacacgcgcccagccccctgtgtctcttgctgctgctgctgct

SEQ ID NO: 532 - DNA, 479 bp, Homo sapiens
  misc_feature (1)...(479): n = A,T,C or G
ctgtgtcttgtctgcactaacaacctcnccaaggctagaactgacacccatctcatgtgccagaaactcagcccatgctctgtgtaaaaggncccccagagcnggaaccagaagatggggcctttggacgtgacaagagggtgccagtgcccactccccacggaagactccatcttggnacaggagcttctagactgtaccagaatgaacgaggaccagagtncagacngagaatggtgctggccacttntattntgagagcccgtcacagctcagggngtatctcacacagccatngtttgaacagacttcatnctcgnagagcactgtgacgtcatgtgagtnctggatcagacattttgcacatggcttctggcgaccttgactgnaaacctctctgngagaaggaggaggaagcatgagccntctctgcnatgcaaggcaccagnctagnttnctgctgcttatggagactacac

SEQ ID NO: 533 - DNA, 478 bp, Homo sapiens
  misc_feature (1)...(478): n = A,T,C or G
gactgaggtggggtctttcaagcaggagctagtgcaactgagcgtctggtcaccaacttgctctttacgagatctactgaaccagaaaagtntgtgaacagagcttcctgagttttggaagaccaaggctggcancagtagggacacagaggaggctggagggagcgttcctccatggagcccactcaggttgcagagaaccttgtcccaaaccagcaacctcctgttcctgacctagaggatcctgaggacaccagagatgagtccccagagaactcagacactgtcgtcctcancctgttcccctgcaccccagatgctgtgaatcctgaagcagatgccagngcatcctcactgcagggaagnttcttgaagcactccacaaccctcacaaaccggnaacgtgggaatgaggtctcagntctgccanccaccctgnactccctttntatccaccancttgcagcccaaggggagc

SEQ ID NO: 534 - DNA, 478 bp, Homo sapiens
  misc_feature (1)...(478): n = A,T,C or G
acggaagatctggattcaccaacgtcacctctccactggcttctgcttctgatccagcagcntagtcctcaccatacaggctgcagatggcatctccagcgagtaaggataccacggaagatctgcagaacgtggctggtgcctcagagggtcaggctccgggggagcaggcggcgctgccagcaggccagacccaggttctcagtgagatggccaagtaccaagctccacagcgacctgaggacacagttatgatccagtctgagcacactggggctatagatgttctttcagcggacttggaatctgcagatcttctgggggaccacaggaaagtctctccacctctgatggctcctccgtgcgtctggacctttgccaaagtgaaggagttcaaaagcaagctgggcaaggagaagaacagccgtctggtantgaannggngagaagnggncaccatccgggtccctacccaccc

SEQ ID NO: 535 - DNA, 477 bp, Homo sapiens
  misc_feature (1)...(477): n = A,T,C or G
ttattaccggaagttgatgacaaagtggcaaaaatcaggattttaaaggtggacagncacccagagagctttggagacacccgggagaaggttggggcttttggctttgattactgctattggtcagtcaacccagaggaccctnactatgcatctcaggaagnggtattccgggacttgggaactgaggtnntggctggtttanccaaaggctacaacatatgtctctttgcctatgggcagacaggctctgggaagacatataccatgctggggactccagcctctgtngggctgactccgaggatatgtgagggtctcttcatcagggaggatgactgngcctctcggccttgntcccgtagcataaaagtaagcttcctagaaatctacaatgaacgggtgagagatcttttgaaacaatccaatcaaaataagncctataccttaagggncagggagcacccaaagatgggc

SEQ ID NO: 536 - DNA, 477 bp, Homo sapiens
  misc_feature (1)...(477): n = A,T,C or G
gactgagagaacagtgtgattttnctaccgnggaaaatggaaggattgcccantattattatactgtttaaaagcttttacttccccatgagcgnagacaaaaaactactnattcttctgtntgnntggctatgcaacccgaaagnggnaagcaatgaagagcanatcaggtgcacagcacnaaggcntggtctccaaacccaaggtgctacaagaaatgnctgaagcctgacctaaggaatgggtacgtctccaatgacaaagnactgnncaaacttnaagagaggatganctacnnttgctctncangatacnaaaccactgggggaaaggacgaggcggtggtccantgtctttctgcagggtggtcntgtnaaccgtcctgcagnnaagaacaagagacatgtttgncccctgagctggaacntngnaattactccnngacgcaaagancnttcaaagtgaaggacatagagg

SEQ ID NO: 537 - DNA, 475 bp, Homo sapiens
  misc_feature (1)...(475): n = A,T,C or G
gagggcatgctggcgcacaaagacacctctgntcncagagaantntgtctnngcaagagacaaangtnngtctnagaacggatnttcagaagccagnccgnntttacngctgcggagtctcnaggccagccagagctacccagtgagaccactgctaaaagcgagacggactgagacgaagctccgctggaaggcgatgtggccgcgcctagcccgggtcgccgcagcccacgcccgcccggaagccccgcgcactcactgagctggaccatggtgcctgggcgagcggctctccagctgtcccgctgcacagccccgcggcacagagcctgaagcccggaagagcgcccccaagcggccggcgggcacacgacgcgacgtccgcaccactccagagccggaaagcccttntgcggaagcctccggccgatcggcccgccccttccgctttctnttncaatgcgcacgggaaaca

SEQ ID NO: 538 - DNA, 475 bp, Homo sapiens
gacccaggggcctcctgataaccccggctttgtggagtctgtggatgaataccaatttgtggagcgcctgctcccccctaccaaaatcccagagccaccaaaacataaacattaccccactcctagtggttggcagcctcccagagatcctcttcccagcttgccctactttgttcgtcgctctcggatgcacaatattcctgtctacaaggagatcacacacggcaaccgacagatgaccttgattcggaaagtggaaggtgacatctgggccctacagaaggatgtggaagaatttctgagcccactgctgggaaagacacctatcacccaggttaatgaggtgacaggtactcttcgaatcaagggctactttgatgagcaacttaaagcctggcttcttgagaaaggcttctgaggcctgatggtcagccctgtggcagtgctcgcgacagactggcctccagagaggagg

SEQ ID NO: 539 - DNA, 474 bp, Homo sapiens
  misc_feature (1)...(474): n = A,T,C or G
agttcctgaggatcttcgtactanaggctgctgnccgtggggtctggcaggcccaggcagaagacctggatgttgaggaagtggatcagctggagaangtgctccctcacctgctnctggacttctagagnnccctnctgtggcctgnaaggnctagnnaatccacaccagcatcaactcctgagctntccagcttcaggaggatggnaagatcccagcagctgttacctccaagagnncttgcaagacaggngcagggaaaggtgaaccagcctgcctccagacacagccctnctcccncccccagcagccttgnattataaataaaccagctgatggnagtgncttcttcttgccaccctacatgaaagctgctgtgtagccttttaaccacctgaccccnacccccaggatgcctccctgagctgnaaatttgttnttacaaagcaacatcaataaatcaacaccatctct

SEQ ID NO: 540 - DNA, 470 bp, Homo sapiens
  misc_feature (1)...(470): n = A,T,C or G
agccggtagaaactcatgctcctgaagtagatcttgagactgtcatcccgccagcccaggaaccttccaatcctgcggagcccttttgcccaagagacctggtgccggtggtgtttcccgggcctgtgagccaggaagactgctgccagtttacttgtgaacttctcaagcatatcctgtaccagcgccatcagctccctctgccctatgaacagctgaagcacttctaccggaaagctccccaggcagaggacacagcaaggaagaaagcttggctcgccacggaggcgaggaacaggaagtgtnagcaggctttggcggagctggagagcgttctnagtcacctacgagacttntttgcccggacactcgtaccacaagtgttgatccttttttgnaggcaatgccctcagcccctaaagaattcttatggaactttgaccctgtccaggctggactccatttcggtg

SEQ ID NO: 541 - DNA, 468 bp, Homo sapiens
  misc_feature (1)...(468): n = A,T,C or G
taattgctacctcatgtctaaagaaatccccttttntgngaaaaagactaaaagtatcttcaacagctgccatgcatagagatggaagtttacggtggagaacatacggaggaagtttggggtttttaattactccccgttcaggacgccctacacgcccaacaaccagtaccaaatgctgctggatcccagcaaccccagcgcgggcncagccaagacagacaaacaggagaaggngaagcttanttttgacatgacagcgtcccccaagatccttctgagcaagccccttctgagcgggggtgccggccgcaggatctccctgtccgacatgcctcgctcccccaccagtacgaactnttncgtgcacacgggctccgatgtggagcaggaccccgagaagaaggccccgtccagccacttcagcgcaagcgaggagtccatggacttccttgataagagcacagg

SEQ ID NO: 542 - DNA, 468 bp, Homo sapiens
  misc_feature (1)...(468): n = A,T,C or G
tgagcacctcctcacgccacgccacgccacgccatgccacgccacgtgaagccaggttcggncggctgcaccgcgtnaacttacgtacaggttgtctgttctcagcaaaaccctttcggagaaaaatgcaggcagggacccagcaggttgtgcatgaccgcacagttctgggccagcatcatgagtggtccatggagctcgccgncatccgccagcccgtcctcgcttgtctgcaccgccatgtagctggtcttctcctcctggcgcatcttcagccggcaccaancaaataagagagaggtgaggtgtcacctccctgtccacctgggccctcccagccccagcctggctgttgattctagaagatccttgagagtcacgtgatgacgttctgagcgctttgacacggacagggttgaatatgtaattcatccaacggatggagatgccaatccttgactgaagtgt

SEQ ID NO: 543 - DNA, 468 bp, Homo sapiens
aaacctgttagtcctggtggaccagcatgctgcccatgaacgcattcgtttggagcagcttattactgattcctatgagaaacaagatccacaaagcgctggccggaagaaattattgtcttccacaataatccctccactggcaatcaccgtgtcagaggaacaaaggagactcttaccggtcttaccacaaacatttagaagatctggggcttgagttgctctttccagatgctagtgattctctgatcctggtgggaaaagtgccgctctgctttgtagagagagaagctagtgagcttcgaagaggacgctctacctgtgactaagagtattgtggaggaattaattcgagaacaagtggagctgctccagaccacaggaggtatccaagggacactgccactgactgtccagaaggtgttggcctcccaggcctgccatggggctattaagtttaatgatcgt

SEQ ID NO: 544 - DNA, 466 bp, Homo sapiens
atgcatcaatcctcttgggactgttatcagatgtttggaggccatgattaaataccttacactgtggaagaaagaggggcaggaggagccatatgtcagcctcacccgaaagaagatgctaatagctggccaggaggtgctgatagaatgggaggtgggccacctccatccggaccctggctatgcatcgcaatgcctacaaacctgtgttaatggctttttccctgatatctgtcacctacggggctaccctgtgcaatatgttggctatccagatcaagtatgatgactacaagattagactggggccactggaagtcctttgtatcaccgtctggaggacattggagatcacttcccgcctcgtgattctggtgctcttctcggcccaccttgaagttgaaggctgtgccccttcttagtgctcaacttcttgatcatcctctttgagcccctgggtcaggta

SEQ ID NO: 545 - DNA, 466 bp, Homo sapiens
  misc_feature (1)...(466): n = A,T,C or G
gactgaggttctgtacttcaccaatggccacctgtatcccactggctctaaagcagatcgggccatccttctccacgatccacccacaggaggactggctaccctgaaactgactgacctccgcccttcagacactgggacctacctctgcaatgttaacaacccaccagatttctacaccaacgggttggggttaatcaaccttactgtgctggntaangngtncnggcgantcantattancnngtattntcctgacctnccntggcnncnncanaagctttagnagtaatctgcangncacgcgcccagtgngcagntgatanctttcaagaactgattcttctgaaggcnagagaanctntganggttnttancgttcctggtgataatgnngcncntgtccatggccgcattctnactnaaaaggttccagaaagagaggaatnaggagcccaaggagacc

SEQ ID NO: 546 - DNA, 466 bp, Homo sapiens
  misc_feature (1)...(466): n = A,T,C or G
gactgagtttgcctccatctttgcttttgcccctgtggtgggtttaagggcaaaacagaaattcaagtgaactgtcctaaagttggtgtcaataagaaccagactgtgacagctacttttggttatccattcaggttgaatcaggcatcatttcatacacctccaaatgtcaatgtgtgtgacgtgaactgggaaaagcatgtcctcataggtgattactcctcttctgcacagttctacgttacgtttgcagtctttgtgttcctgtactgcattgctgcccttctgctctatgttggttacacgaacctctaccgggatagtcgcaaacctgcccatgatcgactttattgttactcttgttgctacttttttgtggttggngagttcctcancctgggctaaagctcttacagatnttaaagtagctactggacncagaattgnggagggaacttgaaatttg

SEQ ID NO: 547 - DNA, 466 bp, Homo sapiens
  misc_feature (1)...(466): n = A,T,C or G
tccttctgggcttgagagacagaacaagcaacacctgtcctcatccaaaccctgtggatgnanntnttcacccaagaaattntggatntcaaccaaagagccattctgctggatgacgacgtatgatggggaagtgagctgtacacaaaccacattttgtatcgnaagccnagtgngacacctttgatcatgttcatgaacatgactggngatgttcctgacggtgnncagnnnctttctgttaccccaccatttgtnaacccagagccttntctttttnttcccaanaagactcagctncacgttgatgtgatgtgaagtccctccgcanagnccccctgnggccctncacaatgactgngcgccccttcagcagtgattncgacattctctggaatgtnncacagngctgattgcctgcgaanggaccttcatcctcacagtaganggggcaaaaagagcaagt

SEQ ID NO: 548 - DNA, 465 bp, Homo sapiens
  misc_feature (1)...(465): n = A,T,C or G
tcttgcagcagcgaccactcccnagnaggcagtgngggcaacacgnacagnggcggtggagatggtcggcaacgccgggggcagcactgaggacttgcccagcttggatgaaggaccttgtgtctcggccaccggactctccacgcttngccgactggagaaccttacgctggatcagctgcatcagctccggcccatagggtctcggggtactcaaactgcccagcttaacccacgctggcgcacctgtgtctcgccgtctgggccccccagtctccctggaaccgccgnagcagcagctccagcagcatgagctntgnttacacagtcagncgcaggtcctccctggcattccctttcccgccgggaaccccaccagagaatggggcatcgtnactaccttggcctcacaccngctcancactacatgctcngtgccagatatgcttcatccagggggagtgg

SEQ ID NO: 549 - DNA, 463 bp, Homo sapiens
  misc_feature (1)...(463): n = A,T,C or G
cgggacatttgtggcctgaaccgccgcnccaagcgcgtacagaatgaaggcanggtncaagagcnctaggagggctcatcaaccccgatgggggaaagagcgggaaggccccccggcggccgcgcgggctccatggacaacagcaacaagcacaccaagagccgaggccgggcagccangaagaaggcaggacctgcaggctgccccagagtcntttnnacgacagnccnncccagctcnccaagnggcctggcagccccacgtcccgcagcagcgacgagcnnggatgcgcggaccgacntccgntcgcgcaccaattccaacgccagcaccgagagcggccgacngncgcccatccnggcaagcacngagcnggacgacgtccaggaagacgatggaccccnggcncccatgccgnacagcagcttcngcccanccctggcaccctccgggagcaagccga

SEQ ID NO: 550 - DNA, 461 bp, Homo sapiens
  misc_feature (1)...(461): n = A,T,C or G
actgaggcctgaagctcatgggcgccccagtgaagatgaccgtgtctcaggggcagccagtgaagctcaactgcagcgtggaggggatggaggaccctgacatccactggatgaaggatggcaccgtggtccagaatgcaagccaggtgtccatctccatcagcgagcacagctggattggcttactcagcctaaagtcagtggagcggtctgatgctggcctgtactggtgccaggtgaaggatggggaggaaaccaagatctctcagtcagtatggctcactgtcgaaggtgtgccattcttcacagtggaaccangncnggngtcgaggccaccctcttgcgcattctnttgctgttagngaacattnctaagctntnaaaacnctgntncatnnnctgtannannggaccntactagaanttggnggacctgctccctctccctctgttttaaatgt

SEQ ID NO: 551 - DNA, 457 bp, Homo sapiens
  misc_feature (1)...(457): n = A,T,C or G
tgcaaaacagaaaaggctggngaatattctgagacgtatgatggatncaatacattnactatacctangacagnctntgatancctttcttatggctcatctcattaacgaaaaggatggggaaaccttccagctgatggggctctatgatcagctgcctccaggcccgagaatgaagaatggcctgagcctccagtgttgagtggagacttctcaccaggactccaccatcatcccttcctatccatacagcatccccagtacaaattctgtgatctgcattccatcctgtctcactgagaagnccaattccagtctatccacatgttacctaggatacctcatcaagaatcaaagacttctttaaatttttctttgatatacccatgacaatttttcatgaatttcttcctcttcctgttcaataaatgattaaccttgcacttaaaaaaaaaaa

SEQ ID NO: 552 - DNA, 457 bp, Homo sapiens
tacaggtgactcttacttcttcacggtttgaatccactgctctgaagattatccaactgaattagaagtacaacctacagaatacaagaccttttggtacaattcaagaccgtcataatgagtttttctctggacctaccacctacaacgaccaacatcatgcaacaagagatacataaattaaatctgaaaccggagagaaactttgtaaaaaccctctaggtgccttctccttcacaaaatcctgcaccccatttccactccacggtccctttatatcacaagacgaacttacccagcctctttgtttgacaagccagtcccgtttcgtccttacaagaacatctgtgatagtttctgctaatggttcgatgaagctttcttggtttacgctctttaagtgtttggccacaaaggcaccgaaagaaataagagtcacaatcctgaaaaaaaaaaa

SEQ ID NO: 553 - DNA, 456 bp, Homo sapiens
ctcccaaggctaccccaggtctgtgctgctacaatttcccgacggcagttctcagggaagccgggaactgctgttggccctgtcttggctcctcgcccgaggacccttgcttgagcagctgcttgcccagacccgtgtgcagctgggtgaccagttgccccagtgggaggctccaaccagtcctggtcttcctgcaccctttgtgaaaccaaagagcccggtggatctccgactagtggaatggctgatgggaaggctgcggtttaggtggcgatgcctgatctctagtcagcaggagcagtgtatcctcctcagcaagatccacctgtacacccagggatgccacagccaacggagccttggccatctttctgttgccgaaacagagatgcttagagatccagagagcggtcagcagcgtggcttttctaggcagtggactcctgagcttcctga

SEQ ID NO: 554 - DNA, 456 bp, Homo sapiens
  misc_feature (1)...(456): n = A,T,C or G
gtgggcgcgagcctgngactntaggagaaagagggnagtgganggggcaccnctacacagttaccgggatcatgcgttncggaccncgcagatccngncccatccggtggcaccatcgtctgangactcnctgtcatnccaggcccnnngaggggcctatctcctgaggaagcttntggaacatgtggctccacggctgagccccacctgcctgcgcctgggttcagcctctcccaaggtgcccgcgcacgcctgnattactctggatgagcaagtgctgagnttccaacncanggtgggcatnctgtactgncgntgcangccagggctctgaggaagagatgtacaacaaccaggaggncggagcagcctttatgcagttccttaccttgctgggtgatgtgnngcgactnaaaggctttgaaagttnccgggcccagctggataccaaaacgg

SEQ ID NO: 555 - DNA, 453 bp, Homo sapiens
ctgtcaccatgagtatggcgtctcattggtcatcttagatctacccccgtgtcttatggctgacaagatgcaggtactacggcacctccgagcacacactgaaaacagctctcctctcaaagaacccagtgcttgtgtcacagtatgagaagttagatgctggggagcaacggttaatgaatgaagccttccagccacgcagtaacctgtttgagcccattactgtgcactcccagtcagactggatctcctcccaccccgaggctccccaagactttgagcagtttttctctgaccgctacagaaaggcaccctgtccaaagaaacatataatctacattcagtccattggctctctaggcaacaccagagtcatcagtgaagagtatattaaatggctcaagggctactgtgaagcatttttctacggtttgaagggtgaagttcttagaa

SEQ ID NO: 556 - DNA, 452 bp, Homo sapiens
  misc_feature (1)...(452): n = A,T,C or G
agacaccggcgcgcccngcgnggcccacacnaccttcaccctggtaggcctttgggngcctggcggnnanccangcgnaccgnctgtgaaancangtgaggcaattctgggtcgatcacttttcgtnccnaattntcggcgggnaggccaccgntgnaccatatctcatncatgtccaccttctatctgctggaccaccgcacgcgacaggccgaactggggctcaactacggcgagccgcgcacccgactgagcgacgaggccttcgttttccgcggcggccgctggaccccagaggggaagcgcgcaagcgcgcgcacgcctctgccctcctccaccatcccggcctggaagccacaagtgcagccgattaagagccaggtgctgctggaagagaataactacctgaagctgcagcaagaactgctcatggacatgctaacagagactac

SEQ ID NO: 557 - DNA, 452 bp, Homo sapiens
cccccatagggaagagaaatggccccagggatttggtcagctaaccaaggaagggatgctacagcactgggagctgggccaggccctgcggcaacgctaccatggctttctgaacacctcttaccacaggcaagaggtttatgtgcgaagcacagacttcgatcgtactctcatgagtgcttgaggccaacctggctggactcttccctcccaatgaagttcagcacttcaaccctaacatttcatggcagcctatccctgttcacactgtgcccatcactgaagacaggttgctgaagtttcctttgggtccatgtccccgttatgagcagctgcagaatgagactcggcagacaccagagtatcagaaacagaagtattcagaatgcacaatttctgaacatggtggccaacgagacagggcttacaaacgtgacccctagagaccatcg

SEQ ID NO: 558 - DNA, 450 bp, Homo sapiens
  misc_feature (1)...(450): n = A,T,C or G
ggcggaggtatggcatttgaggagagcngaancctggngcccatttgtcaagggatgaagagaggggacaggatgggaccctgttggacccagccacccacaggtgccgnagactatgaggtggngagcgtccagctccctgcgggggaagccaagagacaanattagactggancccgatggagagatgangagcgccccccacctgtccccacccggagcacatggnctntgccaccaggaagacaacgttccaacccacccacccnatgtttcgcccaccccntccctcacnttncggggnctccgncatgggagggctcatgcagnacatgtggtaatctngatngcattcatnacanaacaacanctgngcctgnnnggtgaganccgtccanntggcaccntgggggcacgggcaccanaaaccggggtggggggctggggcag

SEQ ID NO: 559 - DNA, 450 bp, Homo sapiens
  misc_feature (1)...(450): n = A,T,C or G
gactgaggtggggtctttcaagtataaaggggccactcacagaaacagaggaacagcgtgtccacgcacatgccatagacgctgaagaagccgtgcgcgatcaagtaggagccaatgatcactgtctgttcaggagaaaacatcttgttccagcctggctcaggtgaagagcaaccccgtcccatcactgtcctccctaggctaagaaacctctccctctcatgagccaagaggctgtctgccattatagaactcatggcaatcntnctgnntcatctttagaacatntttttaccttttacaaangatagtgnagagaagntggagcnagcntttntnnntgngnancaantnnggannngcttaatgtgaanatgataancngncannccnagnnctgctngtcntcnnaagngnnncggcctgatatatggaggctgtgaactgaat

SEQ ID NO: 560 - DNA, 448 bp, Homo sapiens
  misc_feature (1)...(448): n = A,T,C or G
actgagttgtgtggccatcatgcctcaaccagatcccagacacaagctaccatcggttttccgaaaaagaagctatctaataccctgaagaaacccaattcccgggattgtgaagtaaaacttagaaacgtccagcctgtacccaccactccgtgtgtggacagtaaaacttctgcctctcagtccccgaaaacgtctgggcgatgacaacctgtgcaacactccccggttatctccctgttctccaccaangctgggnnaganagaaaacggaccccntcgctcacatacgnggaaggggngcanannagtattcnatgatgagncganatttaangcttccnnccnnnaagaacaagacagagttcggcaacaccatatncagttcntcctcngctcaangaagnncagagagcaacagcngatcntgagctttaaatgaggcgaa

SEQ ID NO: 561 - DNA, 445 bp, Homo sapiens
  misc_feature (1)...(445): n = A,T,C or G
acgacaggaagcatgntctggctccntaaacgnagaccttcnnagntttacccctcccgctgccatgcaccctgcggccttcccgcttcctgttgtcgtggctactgtactgtggggagcagcccctgtccgagggctgattcgagcgacttcggagcacaatgccagcatggactttgcagaccttccagctctgtttggggccactctgagcgacgagggactgcaggggttccttgtggaggcccacccagaaaatgcctgcggtcctattgccccaccaccctcagccccggtcaatgggtcagtctttattgcactgcttcgaagattcgactgcaactttgacctcaaggtcctaaatgctcagaaggcctgggtatggtgcagctgtggngcacaatggngaattccaatgaactgctgaacatggggtggaacagct

SEQ ID NO: 562 - DNA, 445 bp, Homo sapiens
  misc_feature (1)...(445): n = A,T,C or G
agacggctgtcggacttcttaaagccgtgcaccaggagntggcnancttcatanatgngccaganatgacattcccccacnagnaatgggganagcctgaattcttctcaaaggnatnagaacagtccgatgtgatgtatggagaactatnnaatcctggtgtctctggacactttncatttgnntatgncatagtgtaaatattcctgttggaacaaggnaaagaccnatggaccgngaagacanagctgacagacagnttctccacaggtgggcatcgctaccggtggataaacacagaacactacgtggagcgaggctcaaagaacagcggtgcaggtaagtggngccaggactcaagggaaggtggaaccgttccagcccacgttggcagcgttcatgtcgtaatagttgatgtagacccggtccgggctgatgtgcaggc

SEQ ID NO: 563 - DNA, 439 bp, Homo sapiens
  misc_feature (1)...(439): n = A,T,C or G
tgccacccgcactactttcttcaagggtgccagccccagctccaagtacgtgaagctgaacgtggggggcgctctctactacaccaccatgcagacgctcaccaagcaggacaccatgctgaaggccatgttcagtggacgcatggaagtgctcacggacagcgaaggctggatcctcattgaccgctgngggaagcactttgggacaatcctcaantacntgcgagacgggggngtacccttgcctgagagccgccgggagatcgaggagctgctagccgaggccaagtactacctggngcagggcctgctggaagagtgccaggccgccctacaaaacaaagatacttacgagcccttntgcnaggnacccgttcatcacatcctccaaggaagaacagaggcttatagctgacgtntaataagcccgccgggaagc

SEQ ID NO: 564 - DNA, 439 bp, Homo sapiens
  misc_feature (1)...(439): n = A,T,C or G
gaactgagcactgctggccatgcccacctccgtgctgtgggcggtggacctctttgggagagtgtataccctgtccacggccggtcagtactgggagctttgcaaggatgtccaattggagttcaagagggtcagtgcggccacccagtgctgctggggcatcgccggcgacaaccaggtctacttgtatgtgtgctccagtgatgtacccatccgccatcgagaggaggcctatgagaatcaggtagtgttttgtgtgtgngngtgtgnggnnaagctcctgccgagcgaccgctggccatggagtgacgtgagtgggctccagcatcggccgctggatggggtagcactgccttcaccacactgggaatgggagtcagactggtacgtggatgagaattttggaggggagcccaccgagaaaggggggtggacatac

SEQ ID NO: 565 - DNA, 439 bp, Homo sapiens
  misc_feature (1)...(439): n = A,T,C or G
gactgaggtttatggtcngctgnggganagtgatgactggtttcatggaagactgtgttggattnantctttctcaagcacagnatatggctgaggaagacnangaanatgtntgtgtaaggtgctgtgctgaagaagataaaaagactgacttactagacgcagcagatttttgaagcccaagctcccatcgaagcccacagcgaagcatnaaaggatggagtgtggtaagctgacatcatcgaagcacgcagtcactngacgataaacacagacactcagatgaccctgggaagcacaaggtcaaaattntaaaacngnagtctggtgagggaaaaacttcctctgacagtagagataatgaaattaaaaaatggcagctagcccctcttcgcaagttgagccaaccacatttacctcggagatcatcagaagaaaa

SEQ ID NO: 566 - DNA, 436 bp, Homo sapiens
  misc_feature (1)...(436): n = A,T,C or G
atcgaaggcaagaggtaacactgaggctgacgatgaagataatttaatgtggattccttccaactcaggctgcttctgatgcnttggaagctattgttccagttactaagatggtagtaaatctttgcctcccacagttcagaccaagaattcactgcaacaaggtgtcagctgatggttacgaagtagaaaatctcatctctgaagacctcataaaaagaagccatggctttaggacagagtatttcattagacctccaatctatgtgacagtttcctttccctttaatgtggaaatctgtagggttaatatagatctcacaactgggggatatcagaatgtctctggcctggaattatatacatctgccttatctagcagagtctctcangatgcccaggactgctggactacaggcccggtggagacatctgt

SEQ ID NO: 567 - DNA, 435 bp, Homo sapiens
  misc_feature (1)...(435): n = A,T,C or G
gaaagcagagcgactcggnttnagggnaaagcgccngagatgatgggcntntctgctgccgcccnncaagcagagggacttcggagatcatgcagcagaaagcagaaaaaggcaaacgagaagaaggaggaacccaagtagcccttgtggccttcgtgtccaacccctcttgcccctccgcctgtgtgccctggagccagtcccaccatgctcgagtttcttcctgtagtgctcacaggtcccagcaccgatggcattcccttttgccctgagtctgcagcgggtttccttttgtgcttcctttcccctcaggtagccctctcttccctctgggccactcctgggggtggagggggggttacccccttcccagtggttttttnatttcctgtggggcacacccccaaaggtattaaaaggtagctttgtaattca

SEQ ID NO: 568 - DNA, 434 bp, Homo sapiens
  misc_feature (1)...(434): n = A,T,C or G
gactgaggggatgttggaaactactattatggncaagggcaccccatgaagcctcaccgaatccgcatgactcacaatttgctgctcaactatggtctctaccgaaaaatggagatctaccgtcctcacaaagccaatgctgaggagatgaccaagtaccacagtgatgactacattaaattcctgcgttctattcgcccagataacatgtctgaatacagcaagcagatgcagagatnnaangatgccnacnnccgtcctccatagcgatggcattggntgagtttctgtcatggtgagcaccacagnctgtgccctggtgctgcnaacctnaatnagcangacncncccatcacgngaganctgtnctggangccngcancatgcatgaagcctgaagcatccgncttatgtnacacttgtgacatcagggt

SEQ ID NO: 569 - DNA, 434 bp, Homo sapiens
  misc_feature (1)...(434): n = A,T,C or G
aattgtctacaacccgtggatggtaccatgtcccttgatatgaaagagcaccctgatgctgaggtacaaaagaaccaagtactaaccctggaagactggaaagagaagtgggtgacccgtcacatctcattccatcaggagcaagggcatcagctattaaagaagcatttggatacatttcttaaaggccagagtggactgcggagtgtttttccccctctgtggaaaagccattgagatgaaatggttcgcagatcggggccacactgtagttggtgtggnnttcagtgaaattgggattcgggaattttttgcagaacagaatctttcctacacagcaanaaccgctcgccgaaattgctggagccaangtatttaagagttcttcagggagcatttncttatactgctgcagnatatttgatcttcctaga

SEQ ID NO: 570 - DNA, 434 bp, Homo sapiens
  misc_feature (1)...(434): n = A,T,C or G
ctctggtgccccataagcccntctgcgccangcttagnnngnntgnggggctgnttganagnnatgcnggtgncatggtgctgancgcggctgaagataccttgggctacttcaacgggaagtgggagttcattcgcggatggggagacgatacaccagcagttggcccaagatgggtgactttggaagccatanatgtggcacgatgnagagtcagtgatgataccgtcntgcacctgnccacagcgggaggccctcatggaagccggccagtccccggatttgnctcggctgtattccctactanccaaacattaccggctctgcatgggagacatggatggccgggcaccaggtgntgctngnatncagaangccatgctgatacagcccaacaggtccgacggttataggattcccttcaacagtcacga

SEQ ID NO: 571 - DNA, 431 bp, Homo sapiens
  misc_feature (1)...(431): n = A,T,C or G
cactggaatctttcgatggcgnacngcttccagggattcntacacaccncganagtnccctganagcnganttgctncttcnagttncaggacacagacatcctntnggnaacatttcccaagtcaggtaccacctggatgcagnangttctgagncttatcttctgngagggtcactttgtggcctattcacaacctncccacctggncccgcgtgccctgggatagagcaaatctgcttngatagcctccattccaagcggaacaccttcctggcctnggntnttcanctcncacttgaacgccaaaggactgtnccncagcttntgatgaannccaaggccaaggnggtgtacatggcccggaacccccanggatgggcttgctttncttnntccactttcacnaaataacncggcttcctgcccaat

SEQ ID NO: 572 - DNA, 430 bp, Homo sapiens
  misc_feature (1)...(430): n = A,T,C or G
attcttcagctatgtattgngaaccatgacctatttatgaggcngacnnanagctgactctttanaagttcagcnagatgaaagcccangccagggannagaagtctaaggaagcanatggaaaggcagcaggcatggctcgagagaagcntatgctgggaggagnccgagctgtacaatgaaatgagttagagagnaggctcctgcagatgaaagaagaagcaaccgatggccaatgaagctctgatgctctctgaggagacagctgatctgtntggctgaaatggctcngatcacagaggaggangccangcttctgncacaaaaaggctgcagaggctgancaaganatgcagnngaatcaaggncacngcncatttcgnncagangaggagaagcgcctcgatggagcataaggtgcttgaaggct

SEQ ID NO: 573 - DNA, 430 bp, Homo sapiens
  misc_feature (1)...(430): n = A,T,C or G
caaggattgttgcctgtgtncnncaggcactaaagggcttttcatncaaaggngtcacattctgtgtctcagattttccacagcccngatctggccatangggacacngtatgtgantgcatagtaagaagcctgtatggaagcagcnccataagncctgggcccagacagtggctgctaacttagaactcattaacacctgggtgggtganaacnccaaccataagatccgnaagctgctggacagcctgccttctgacacctgccttgcccttntnaatgctgngtacttgagtgccnagtggnagatancattngnaccannaangatgatggcgcctttnttctacaaaanctctatgattaaagngcccatgatgagnagcgtaatgataccctgnggnccatttcgatgaccatactttgaagg

SEQ ID NO: 574 - DNA, 429 bp, Homo sapiens
  misc_feature (1)...(429): n = A,T,C or G
gaacctgcccagcttttttttaggctgacaggcaggatncagcctagaaaggatccaagcagangatcaatgagtatcnggaaagagtgcaagcccttcactctgnagttcaggcaaagagtacgtgatcctttganatnaaaacatcagttggatctagaacgngcccattttcttgttacacaagctttcgatgaagatgaaaaggggaatgtggaagatgccatannaantntatacagaagcngaggaacatctgtctaaaaacctctantgaaacangcatgacaagactctgcaaaataatattgaancaagacaggntcgacaggcacctagatatgancagatgcattgagtgancctttgacaaagccattttgnaaactcaggtnancagaanttngaaaacaaagactcctccagtaa

SEQ ID NO: 575 - DNA, 428 bp, Homo sapiens
gactgaggtacagacgagagtcgcgctctagtggcgtcacgcacagaaggcccgccctcttcgagacagacccgttttctattggctgcaccgcactttgacagcaccgcttgctctgttaaattttgagtggttaaggaagtgaccggaagcaaaggggccgccggaagatgacgtcacagacccgggttcctgaccactccgcttccgtattggcccttgggcagcaccaatgaggttttgcattactggacagtcgactttgggcggaagtggcttcgtaaaaccgaagagcgagatgggggtgaagctggaggtgtttcggatgtccctctacctcactttccccgtggttatgttctggatctccaatcaggctgagtggtttgaggactatgttgtccagcgtaagagggagctgtggccaa

SEQ ID NO: 576 - DNA, 420 bp, Homo sapiens
  misc_feature (1)...(420): n = A,T,C or G
gcatctctggtgggggcgctactgttctccaagctagtgctgaagctgccctggacccaggtgggattctccctgttgctcctgtacttggggtctggtggctggcgtttcatccgggtcttcatcaagacggtcaggagagatatctttggtggcatggtgctcctgaaggtgaagaccaaggtgcgacggtaccttcaggagcggaagacggtgcccctgctgtttgcttcaatggtacagcgccacccggacaagacagccctgattttcgagggcacagacactcactggaccttccgccagctggatgagtactccagtagngtgnccaacttcctgcaggcccggggcctggcctcangcaatgtanttgccctctttatggaaaaccanaatgaatttgaggatctgtggcta

SEQ ID NO: 577 - DNA, 420 bp, Homo sapiens
  misc_feature (1)...(420): n = A,T,C or G
gcgcctggatgacgcnatcgttcagcactacacagaattgaccacagccattcgcacataccagagtatcacagaacgcatcactaactcgaggaataaaatcaagcaggtcaaagcgaatctgctttcctgcaagatgctgctgcattgcaaacgggatgagccttcgtaagctgtggattgaaggaatcgagcataagcaccgtcctgaacctactggatgagattgagaacatcaagcaagtgcctcaaaagctggaacagtgcatggccagcaagcactacctcagcgccaccgacatgctggtgtcagcagtggagtccctggagggtccactgctccaggtggaagggctcagtgatctcaggctggaacttcacagcaagaagatgaacctgcaccttggttctcatagagga

SEQ ID NO: 578 - DNA, 418 bp, Homo sapiens
  misc_feature (1)...(418): n = A,T,C or G
tggaagtgccgggaagtgatcaaggaacctctgccggcgagcctcctacatcagccaggagaagatctgcccttcgcccanaatgagcncnnantgtgcccgnaacaacatgaagactgcgtcatcaccacagagactgcagtgccccatngacacanatccttctnannagattctntggnggttaggnacggtggttnctcctttncanncnttactgttcactgaggcacaccgagagaagtttcaacngcagccgccgccaccaaacggtgcagcagttcaagcgctttattgagaattacaggcgccacattggctgtgtggcggngttttacaccatcactggggcgctcttcctggagagagcctactactatgcntttgcagcacaccacagcggggatcaccgatacca

SEQ ID NO: 579 - DNA, 418 bp, Homo sapiens
  misc_feature (1)...(418): n = A,T,C or G
gactgaggtcccccantcgttaaggagnccggngccacagatgaggttcccaaagncaactgctgggccttnaggctctgtgaagaggccaaggnaaccctcangcctgggggcagtggattggagaccangggcagcccggagaccccttctnttnacaacactgatctgaggaccgcccggntcctntagatgtcacctgtgcaccaggaggtcgccagctccgtagagcaaaggccagagtcggggcctaaggagaatagaaaaggactcagcccctactctctattaacccaatattcttgccagcaagcctggtcccagcacccctcacctgtacacaccgtctcccacacagcttccctcttctggaggctggcatcgtgggagtgggcccaaaaagattgtcagagagaaa

SEQ ID NO: 580 - DNA, 417 bp, Homo sapiens
gactgaggtgtggcaagggctggatgtcgtgcatgcttcgcgagccctcataggggccactgacccaggggacgccatgcccggtacgatccgtggggatttctgcgtggaggttggcaagaatgtaattcatggcagcagacatcggtggaaagtgctcacagagaaatcgctctttggttccgtgaggccgagcttctgtgctgggaggacagcgccggacattggctatatgagtagatgttattgcagtcagcattaccaatctggaggttgttggtcttctgtgatcttcacagagctcagcatcagtaacagtgctgtgtgagtgcaggtcaacccaacctagtcggtccagggacaaccactcccaccccgtgttgcctttcataataaaactgcagaaaaccaaaaaaa

SEQ ID NO: 581 - DNA, 417 bp, Homo sapiens
  misc_feature (1)...(417): n = A,T,C or G
gactgagacccgaagatcgattcagtaagttactaggaatgggaaaataacagattataccacaagcttgctctgcactggaaactgactaaaaggaaatgtgaaactagcaatatgatggagtatgnaatactaatagaattcttaccaaaataccccatattcctgacccgactgaggagttttcttcagtctcttctgngttatctgtcatttcctacccttagtgccttgtagatgatcttggaatggagacagtctccttcgctgtgttcaatttattctttacaacagnagactattcttctcactcttttatttgtgttaatttaagaaaatttgcacatcttttttgttattaaatgaggcttgtgttttgcactctcaatttttaaataaatgcaaacatatacccgt

SEQ ID NO: 582 - DNA, 416 bp, Homo sapiens
  misc_feature (1)...(416): n = A,T,C or G
ggaatccaagtcctctgctgngtncctggctgaaaacggagtgatggccgaggagaagccagtgccccaacttaatgggagcaccgggtgaccccagagtccccagccactctgaaagtgccttgaataatgactctaaaccgtgcaatacaaatcctcacttaaatgcactaagtacagacagcgcctgccgcagggaggctgctctggaggcagctgtcttaaataaagaagagtaaacttattttttatagagggtgaaggatgctggaagggtaaggattcaggagcatctggagagagagcctgcagttatgtacattttgtcctttccgtaagagaaaatgaggactttggaaattcagatccctctttgatatcagagatataaacaacacattttttttttttttttt

SEQ ID NO: 583 - DNA, 414 bp, Homo sapiens
  misc_feature (1)...(414): n = A,T,C or G
acacaataaatgttcnnaagctgcttcctgctnctggacgaganctntcaggttcctgctctggccaccntgngaaagtgcagctgnnaaccngaagannncacgagctgggtgtgcagcactngngacgcactgagacccnngctngccnganctacatngagaatgnctaccntgagagganggcttcttaccaagncngatgngngntctttnacatggnctcctttatgcccatttgccgggtgaatgactttganattgtcgacattcttaatccaagaacaaaccggacaagtcgttttttaagtggcattatcaactttattcacttcagagaaacatgcctggagaagtgtgaagaatttcttttgcaaaataaatcctctatggtcagaatgcagcagttaagca

SEQ ID NO: 584 - DNA, 414 bp, Homo sapiens
  misc_feature (1)...(414): n = A,T,C or G
gaaccaccagtcttcttggaaatncactacatgggcagccccaatgcaaccngaggcacccctgntgtttgtggggaagggcattacctttgacngtggaggaatcnccatcanggcttntgnanacatggacctnatgangnctgatatgggaggagcagcaacaatatgctcggccattgtgtctgcggnanagctnaacttgcccattaacatcattggtttggcccctntttgtgaaaatatgcctagcggtaggccaacaagccaggggatgtcgtcacagccaggaatggnnagaccatncaggttgataacactgacgccgaggggaggctcatcctggccgatgcactctgttatncacacacctttaatnccaaggncatcatcaatgctgccaccttaacaggt

SEQ ID NO: 585 - DNA, 414 bp, Homo sapiens
  misc_feature (1)...(414): n = A,T,C or G
tgaggcacccggtggttctgtttatgcactgactgtcatcacagtgcatctcanaaagttcccaggcgacttcaggggccacacgtgggcggngtccacctacaggcggatagcatccttggntaacgcttncaatncacncagncatcctggnttgcagaggacagcanagtctcangctccngcntgnagggtgtncagcgtccatcattgccaangccatcgnnctcngagcggcccancactgncgtgtagcggagacagancttcaggtggtccacanacttgaagacntgaaactgcagnggacannnctttagntcgctnatggnccaggangnngaaccctgcnnantnagaggngagaangccattgagataggagacanagtagnatggggagagagacccaac

SEQ ID NO: 586 - DNA, 412 bp, Homo sapiens
  misc_feature (1)...(412): n = A,T,C or G
agactgtggcagatgcaaattcatctcatctccatcaaagtctgcattgtatggagttgtcacactgtagccaaacagagaaagaagtcaagagttgggactacttcttcagtgacataatggaattgcctggcctgttcccatctcagtctgattccctcaggtagagaactaacctaagattcaaccgaaaagtagaccaggggaggattcggacccgatgccccatcatggacattttgtgcaaagttggctgacgattgaagataacaatgtccccatcacacatgtgccgttccacctagagaggtgaggcaganaagggttcagtgaagaaggcacactaagaatgaaaatgacagtggacccagtctctcgtagcctggagatgatattgcgatgctttttcact

SEQ ID NO: 587 - DNA, 409 bp, Homo sapiens
  misc_feature (1)...(409): n = A,T,C or G
tgagtctccatgaagaaatcatttgatttttatgantacatgtctcccagtacccgaggaagagangatgctgatggaggtagtgagcaggatcgagagtgtgattaaagagctctggcccagtgctgatgtccagatatttggaagttttaaaactggcctgtatttacctaccagtgacatcgatcttgtggtgtttgggaagtgggagaacctgcctctctggaccctggaagaagcccttcggaaacacaaagtcgcctgacgaggattccgtgaaagttctagacaaagcaacggttcctattattaaattaacagattcttttactngaagtgaaagttgatatcagctttaatgtccagaatggcgtgagagcagcagacctcattaaagattttactaaga

SEQ ID NO: 588 - DNA, 405 bp, Homo sapiens
gaactgaggaaaaggcaaccatagtcccagtacttgccaacgtgggcccactggatctgcagagccttaggcccaaccttgaggaggtggatgaagtatttgagatgtctctggcccacttgctgcagacacagaaccaggggtatacccacttctgccagggtggccacttcagctacacactgcctgtcttcttgcatggaccacaccgtgtctggggcctcacagctgtcatcactgagctcaccctgaagctgctggcccctggcttctaccagccctccctagctgttcctgagctgcctaggggttgaggcctgcctggcctttaagtgcctctgccatcatttggccaggctagtccagaaccgattaaaagagtgtttgacagctcaaaaaaaaaaa

SEQ ID NO: 589 - DNA, 402 bp, Homo sapiens
  misc_feature (1)...(402): n = A,T,C or G
gtttagggactaggtgncaaaaacngnccagaggccgtcatnacttnttgtggnactctnannggtgcggacngtgatgcatggcgtgagnccatantatgcccccagntngnnangnantanttacnnttgaagactaaaaagaagaagaagatggctgctgatatattcccccgtaagaagccagccaactccagcagcaccactgtccagccagcaacaccagcacancctctgtaacaacaacctcatcccggcccccaactggcagggtctttatcccaccatccganaaagaaatgcggtgatgttcaataatgactttntggcagacntacattttgttggttgggncaccaggtgggacttnagcgggttgccaggacacatataccgtcctcg

SEQ ID NO: 590 - DNA, 402 bp, Homo sapiens
  misc_feature (1)...(402): n = A,T,C or G
gactgagacttagctacggtgcggtggtatangacgcagtggnncatgaggagcanaaggggcccnccgagggctagnagaccatgccgtacatcgangagtcanccaccatgtcagncccagctnagtgcccgnaggcanggtgntggggacagngtctcncccaccccacctgaggnattggnacctggggcgggctntnnntccttgaacgncacagaaactactccnaggatgtggcattgccagcatctacctgactgtnntgnggntntcggntggtccatggtgcccagtgacacatgntnaggaccctgtctgccactgtgcttcagctggacatgaggcaggccagtcccctcctgtataaattaaatgcaaagccttgttcaaaaaaaaaaa

SEQ ID NO: 591 - DNA, 395 bp, Homo sapiens
actgaggtgggacagctgcacgaagtactagttagaccggatcagttggaactgacagaggattgtaaagaagaaactaaaatagacgccgaaaacctgtcttccgcgccgcagctggaccaagccctccgacagtttaaccagtcagtgagcaatgaactgaacatcggggtagggaccttccttctgtctctgtactgacgggcagcttcacattaggcagatcttgcatcccgaggcttccaagaagaatgtgttactgcctgagtgcttctattcctttttcgatcttcggaaagagttcaagaagtgctgcccgggctctcccgatatcgacaagctggatgtcgcagcgatgacagaaagcctgaactttgagaagagtgactctgagt

SEQ ID NO: 592 - DNA, 392 bp, Homo sapiens
  misc_feature (1)...(392): n = A,T,C or G
gccgacaacgtgcatnctcagtgcagtgtgtgnnnntgncatnannatntggaacgggnaagacnggggaagncntcancaacgtnggncnatatgcattnagncntnnttnacaatgtgngntgncacngatncgatagtgtaatacttnnncgnatacaaagtcaanaaagtgagagtnattgaccccaggaaacaggagattgtggcggagaaggagaaagcacacgaaggagccaggcctatgcgtgccatcttcctggcggacggcaacgtcttcactactggctttagccgcatgagcgagcggcagttggcgctctggaacccaaaaaacatgcaggaaccaattgctctccatgaaatggacactagcaatgggggtgcttgct

SEQ ID NO: 593 - DNA, 385 bp, Homo sapiens
  misc_feature (1)...(385): n = A,T,C or G
tgcccacaggaattgggaagccatccatgccttgaccgnttctgnanactgtncatnannagcctgcggnangangttncatgatgaggtggncaanttccgcttcctcaacgagctcatcaaggttgtgtctcccaagtacttgggctcccggacatctgagaaggtgaagagtaagatcttggagctgctgtacagctggacggtttgcctgcctgaggaggtgaagattgcagaagcctaccagatgctgaagaagcaggggattgtgaagtcggaccccaagcttccagaggatgccatctttcccctcccccctccccggcccaagaatgtgatctttgaagatgaggagaagtccaagatgctggcccgcctgctgtag

SEQ ID NO: 594 - DNA, 382 bp, Homo sapiens
  misc_feature (1)...(382): n = A,T,C or G
attagctcattctgcactgttttaccgaagaacccattaaaagggccagtgaatcttgtggaaaatggcgttcagtgatcttacatcgaggactgtgcgtttttatgataattggatcaaagatgctgatccgagagttgaagactatctcctcatgtcctcgcctctgccacaaaccatcatcctgggcctctatgtctattttgttacgtctctgggaccaaagctcatggagaaccggaagccctttgaactcaagaaagcgatgataacgtacaattttttcatactactgnntnctgngtatatgngntatgantcggtgatgnntggctggngtacannnnactcngttncgatgcgccnttgttgactattctca

SEQ ID NO: 595 - DNA, 380 bp, Homo sapiens
  misc_feature (1)...(380): n = A,T,C or G
ggtgcttgttggcctgaagaagcctgtgcatgaaggaggtggctgtgggaccccccaagaggtcccagcccgcggccctggagcgctacaaggcacggngttcggacgccatggacaccagagtcccagtactcgggctattnctacaagtcgggccactcccgcagctccctggaagcacagngnccgncgggaccgacaccagntntaagagccgggatgggagtcgtggagataaatcagtgacgatncaggctccgggagaacccctgctggacantgagtccacgaggggggctgagcgggatgacaacctgtggagaaacancaacgggggncacgggcacttntgagcacagnatntcccatgatgacctcac

SEQ ID NO: 596 - DNA, 322 bp, Homo sapiens
  misc_feature (1)...(322): n = A,T,C or G
atgacggcaatgcctgtggggacaagacggnaaggagctntggcctgggctgagancnnggggctactgcccattgtcacctgacctggcaggcaccggggcactcctggcctangctgagcctgagnaaggacaggnggacccggccggttggtnacctcgcttctgngnanccacctcncaggacacactgagcacgtcgcagtttgacgccagtccagccgatgcggcactcacagtgnttactagggtgttggtctgccagcacctgccaccattcttgcagggagccnagtcnnaccatcgcacaaggttctgagga

SEQ ID NO: 597 - DNA, 359 bp, Homo sapiens
  misc_feature (1)...(359): n = A,T,C or G
catggaacatggagaagggcttnagtttggggccatccaccgtgccgatgcctcttgacgccaggccacacctctggccacatgagctacttcctgtgggaggatgactgcccggactcaccagccctcttctctggggatgctctgtcagtggcaggctgtggctggcacctggaggacactgcccagcagatgtaccagagcttggccaagactctgggtacccttccacccgagacgaaggtgttctgtggtcatgagcatacgctgagcaatcttgagtttgcacagaaagtggagccctgcaacgaacacgtgcaagctaagctgtcctgggcccaggagagggatgacgggct

SEQ ID NO: 598 - DNA, 357 bp, Homo sapiens
  misc_feature (1)...(357): n = A,T,C or G
cttgtgcctgcctatntgaagaagacatctgaaagaatttggcattatgggcactgatggcgnagcatgcaacacctctcccccacttncatcaagagactgctcaccaatatacatnaggcccctcacccggatcctgcggccaccttttccatcatgccaaagaataanggccncaggaggcnaaaacaggcgcagaggtaaaaangaaaatgaatnttgaccaaaagagagttantgtttaaagaatatgggcaagagnntgctcaggtgaccaaaatgctgggatgcggactggttgnaagcaangtgtctttgatggtgtaaggaggctgtgccacataatgacgaatgttg

SEQ ID NO: 599 - DNA, 353 bp, Homo sapiens
  misc_feature (1)...(353): n = A,T,C or G
actattggtctagaacagacngccttgnacactcctaacgtcagaagncggtggggcnngttgactgagccctggcagtctcccagtgtcagcatgaactccagggtcccagctactcagagctggttcagcagccacctgcccaccactgagcctgacttggagcccgccactgccgccgaaggctctaccactgagaccgccaccctcagcccagaaaccacaagcttcaatgacaccagaatccctgatgtggcaggtggtgcagctggtgtgggcaccatgcttctgtcttttgggatcatcacagtgattggcctggctgtggccatggttntatacatcacaagcaa

SEQ ID NO: 600 - DNA, 348 bp, Homo sapiens
  misc_feature (1)...(348): n = A,T,C or G
aactgaggaaagccagttctgcaccttcagaagactacagtccagtttaggggccccacacaaagtctggcttcagggatctctgcaggacagttatacagcacacaggcagccgaggacaaggaggaggagagcctgcacctccatcatcagcaacactgaggcagtgcggggttctgtctccaaacatgagttccaggcaggacttaatacacnnncagngccaccaactgcttgagctcanttttatttacttnaattaaacngnatttcttantanaangncagnagatgccttgnanaaactgcnnaanaancntgntgagtgaaggccaggtgctgccaaga

SEQ ID NO: 601 - DNA, 347 bp, Homo sapiens
gactggttactacctgaaccgcgctggctttgaagcttcagacccacgcataattcggctcatctcactagctgcccagaaattcatctcagatattgccaatgatgccctacagcactgcaaaatgaagggcacagcctctggcagctcccggagcaagagcaaggatcgcaagtacaccctaaccatggaggacttgacccctgccctcagcgagtatggcatcaatgtgaagaagccgcactacttcacctgagccacgcaacccagatgtatttgtctttccctctgtccccacacgagcctgttttcataataaactttattgtgacaggcaaaaaaaaaaa

SEQ ID NO: 602 - DNA, 346 bp, Homo sapiens
actgagctggctgcccttcgaggagcgagtgacccggtcgtgccctgcgagttcagccaggctcagtatgacgacttccaatgggagcaagtgcggatccaccccggcacccggacccctgaagacctgccccatggtgcctacttgatggtcaatgcttctcagcatgccccaggtcagagggcccacatcatcttccagaccctgagcgagaacgacacccattgtgtgcagttcagctacttcctgtacagcagggatgggcacagcccaggcaccctgggggtctacgtgcgcgtgaatgggggccctctgggcagtgccgtgtggaatatgaaaaaaaaaa

SEQ ID NO: 603 - DNA, 341 bp, Homo sapiens
  misc_feature (1)...(341): n = A,T,C or G
gactgaggagtcagtgagctttgaggatgtggctgtgaagttcacgcaggaggagtgggctgtgctggatccatcccagaagaagctgtacaaagatgtgatgcaggaaaccctgaagaacctggcttccataggaaacaagtcgggcaaacagaaggttataaatgagtatggaaaactatggagaaaactaaggtaatttctttgccacgagatagccatattcttgagagctgttatgtnaggacatctcacaaagaagcagtagatgtactttatgtcaagcatcaaaccaattactaccaaactagaatacaaaccaacatacaaaccaaaaaaaa

SEQ ID NO: 604 - DNA, 331 bp, Homo sapiens
  misc_feature (1)...(331): n = A,T,C or G
taaaaacttggatacccagccaggccagccgggaatccacagatggcagcatgaacagctatagcgtcggaaggaaatctgatcttccctggggtccgcctggcctctgacagccagttcagtgatttcctggatggcctggnccctgcatcagctagngggaccgccagaccctggctactcctgcaatgggtgacattcaggtgggaatgatggataaaaagggacagctggaggtagaaatnatccgggcgcgcggccttgtggtaaaaccaggttccaagacactgccagcaccgtatgtcanggtgtatctgttagacaacggagt

SEQ ID NO: 605 - DNA, 331 bp, Homo sapiens
  misc_feature (1)...(331): n = A,T,C or G
actgagatttaatggcccccctggnggaggcaaccaacccagtgatgatggggcaccccagccattggcgcagctgcagaagcttgagcctcgggtggtccgcagacgcctgtcacaggcccgccatcgagccaccctgggtntngtgtatntcaaggtagancttgaactcaatntgcanctgncattgacntccngagatcctctgnctctacctactgtgntctgggattataggcatatgcctgtagctagctacatagntgagctatatacctagctacacagagtntatgaattgagcaaataancattttgagaaaataaaaag

SEQ ID NO: 606 - DNA, 325 bp, Homo sapiens
  misc_feature (1)...(325): n = A,T,C or G
gactgagttctgaacgacatcatttcaaccatgttcaacaggaagttcatggacgaactgttcaaaccccaggagctgtactccaagaaggccttgcggactgtgtatgaccgcctggctcatgcctccatcatgcgactgaaccaggccagcatggataaggtgtacaancngannaccgtggatttcaaatatctggtgcangatgtgtccacgccccaaggtacgtggtnttnnacagtttcaacnantnanacggccntcnngggnnntgancaaagactctcccaccagtctnacatcaggtggacaagaccttccgagg

SEQ ID NO: 607 - DNA, 317 bp, Homo sapiens
  misc_feature (1)...(317): n = A,T,C or G
catcagatatgataaggncctaaaaaattcctacagtnagcacctatgangccaagccaangggcccgggacgacagatactgtgaaagtatgatgaagganagaaagctaacctcgccttgcaaagatgtcaacacctttatccatggcaccaagaaaaacatcagggccatctgtggaaagaaaggaagcccttatggagaaaacttcagaataagcaattctcccttccagatcaccacttgtacgcactcaagagggtctccctggcctccatgcgggtaccgagcctttaaagatttcagatatattggtat

SEQ ID NO: 608 - DNA, 316 bp, Homo sapiens
  misc_feature (1)...(316): n = A,T,C or G
gggcggccgctcctgaggatcctctgcccagcacctctgcatcagctgccccagttcctccaggtggctntgcagatccatggaaggtctggaatgggggctgttcgccccgagtcacacggctcaatgatntctgtgtggnnggggcacgcactgaagagcggtaagcctanctgggcanccagctggtatagacctgtctaggtgggacaagtccagaccagagcacagagtggactggtcactagcagccacagagcaaaggatagtggctgactccccactccagaaggaatggtaggggtgtttggagagg

SEQ ID NO: 609 - DNA, 308 bp, Homo sapiens
  misc_feature (1)...(308): n = A,T,C or G
gaactgagattatatatgaacaagaaggagtatatattcactcatcttgcggaaaggcaaatgaccaagacagcttgatttcaggaatattgcgtgttttagaaaaggatgctgaagtaatagtggactggagaccattggatgatgcattagattcttccagtattctgtgtgcctggaaaggtacttgttaggaagtacctacnggccaacagtggaagacagtccattttctcatactttcttttatatttgatacatttcaaaattaaataagtaaaaaataaaatctttttaaaacaaaaaaa

SEQ ID NO: 610 - DNA, 308 bp, Homo sapiens
  misc_feature (1)...(308): n = A,T,C or G
caagcgtgctcacacagtncaacccctgntnncgggggnacatgngcctgnctggcatgctgacgaataccgactgaccagggatgtggtctctgcagatncatttnaccctcatccgngcngttntgctgcgagaacgacatcaacatcctgcgggtcancaacccggnncggctagctgagctgctgctactggagaacgacgcgggcccggctggagagcgggggcgccgcgcataccccggacctgcactgtgtgctggtgacgaacccacattcatcacaatggaaggatcctgccttaagtc

SEQ ID NO: 611 - DNA, 306 bp, Homo sapiens
tgagtcctggcctcgacctaaccttaacccctgacttgtgccttaacttcaccgactcttgacttcctgggtcgccccctctgaagaccctccagagttcctgggagagcaagtgcgggcagtgaccgtggtggagcagggtcaggcacctgctgcctgtgtccgtgtctgctaaccccgcccccgaggccttcaactggaccttctgaggctggagaatgtgaaatgtaaggccggcctggctgggttttacgtagtgaggctcagtttcgaattaaagaggtaaagcaactattaaaaaaaaaa

SEQ ID NO: 612 - DNA, 300 bp, Homo sapiens
  misc_feature (1)...(300): n = A,T,C or G
ccttggcccaggctaanatagagaagatcaagggcagtaagaaggccatcaaggtcttttctagtgccaagtacccagcaccagagcacctgcaggaatacggctccatctttactggcgccttggaccctggtctgcagagaagaccccgttacaggatccagagcaagcaccgcccactggatgagcgggctctgcaggagaagctgaaatactttcccgtgtgtgtgaacaccaagtcggagcctgaggatgaagctgaggagggacttgggggtcttcccagcaacatcagctttc

SEQ ID NO: 613 - DNA, 298 bp, Homo sapiens
  misc_feature (1)...(298): n = A,T,C or G
gagtgggaagatgacaccccagtggccaccgccaaaaacatgcctggtgacagtgcggacctgtttggggacggctctgcggaagacggcagtgcggccaacggtcgtctgtggcgaactgtcatcataggggagcaagagcatcgcatcganctgcatatgatccggccctacatgaaggtggtcacccatggaggatactacggggaaggtctcaacgccatcatcgtgtttgcagcctgcttcctgccagatagcagctccccagactatcactacatcatggagaatctcttat

SEQ ID NO: 614 - DNA, 288 bp, Homo sapiens
  misc_feature (1)...(288): n = A,T,C or G
tcagggggatctggattcatgtncctttgtcagagntcnnccattnaattctganacnntnccncgtantacctnnagagaaccactnacaaaaaacaatatatcaccatcagcagnaactccagtgnctggcantgtgtntctggcatggagaagaagccgtggaagacagatgactggctgcgggcaaatcggagcctgggtgggcgtcggtccctgtcagcctccagtgtgtaagccagggctgtggacagagagggcagtcagcaggtggccagatgagcagaa

SEQ ID NO: 615 - DNA, 286 bp, Homo sapiens
  misc_feature (1)...(286): n = A,T,C or G
gactgaggtaatcttgtttnccaacacaacanangggaagttctcgggatcccgggggctggcctggatgagaaactcgtctctccagctgtcgagggttttgaaagtgttgggggcagtcacatcaaacaccagaacacagcaatctgcacctctgtagaaggccacaccaagagactggaaccgttcttgaccggctgtgtcccagatctgcaagacacaaacacaaaacacctggtccttaggagatgcttgtaggagtgacatggctcctttcttctcccag

SEQ ID NO: 616 - DNA, 280 bp, Homo sapiens
  misc_feature (1)...(280): n = A,T,C or G
ctttcaaagagattcttcggggtggctganaatcctgtctttcctggagtggtggtgggtaaacattcctcagtggaaggggaatgtgagagaaggtatggagaatttaactctttattaggatgccccacagggcaggagtcgccctgcactgtgttatcaagngaatcaggcctgtgcctccacagagaacccagaagtctgacgtcatttcattaaaaacctgcttnagntaggagcttcctcctgaagaaagaaagcncaataaatatgatcggat

SEQ ID NO: 617 - DNA, 277 bp, Homo sapiens
  misc_feature (1)...(277): n = A,T,C or G
ttgtggaaagggtgcttggtgnntaacaccccgtctaccantcnnaggtgtactacagcgtgcacatgctgactcccngnggagacaagcctttcnagtgtgtantccgntgggctgccnatgccagctttncttctcanggagggctagctcgccatgtncccacacactnnagtcnncanaactactcaaaagtttctagccagccaaaggccaaaagaagaatctccttctaagctggaatgaaccaagcgggaggaaactaaagaacaaaaaa

SEQ ID NO: 618 - DNA, 276 bp, Homo sapiens; identical to SEQ ID NO: 25

SEQ ID NO: 619 - DNA, 276 bp, Homo sapiens
  misc_feature (1)...(276): n = A,T,C or G
ggtcggtcaggaagcntggctggctccataatgnnaaggaaaggacatgaaaaggcngatccttcccagttngaacttttaaaagtattangggcagggatcattnggaanggttttcttagttaaaaaaanctcaggctctgatgctagacagctttatgccatgaaagtattaaagaaggccacgctgaaagttcagagaccgtgttcggacaaaaatggancgtgatatcttggtanaagtnaatcaccctttcattgtcaaattgcattacg

SEQ ID NO: 620 - DNA, 276 bp, Homo sapiens
ggacctggcggcctgtgggtgtggggggccccggctgtagctcagctgttgtggcctgcaggcctggggggacccgggggcagccgggcagctgtcctggtccagcagtgggtcagttatgctgacacggagctcatacccgctgcctgcggggcgaccctgcctgccctgggacttcgaggtcctggtcaggatccccaggtgagagggaagaaaaagggagaaattctgactacacaaacaggattgggaagaatcccacgaaaaaagtcggtt

SEQ ID NO: 621 - DNA, 276 bp, Homo sapiens
  misc_feature (1)...(276): n = A,T,C or G
agaaaggcggagcataaaaagagaggctgttaaaagaccgcgagaagatnatggccgagggtattttgagtacatcgaagaaaacaagtacagcagagccaagttctnctcagccacctgttgaagaagaagacgaacacttcgatgacacagtggtttgtcttgatacttataattgtgatctgcattttaaaanctcgagagaccgtctgagcngccttcttccccttactatggagagttttgctttnctgngggctggaggaagagctttct

SEQ ID NO: 622 - DNA, 271 bp, Homo sapiens
acatatctgtgcctgtgtgtcttcccttgtgtccatatttaatgtgtaagaacatccctactctatcccagacacgaccatttcacccattgccccatcacagcaataatgtccccgctactggggacccgagccagccaggccatgtttgcagggaaggatgccaagcagggcctgccctgacagttccactttactcccatattctccccgtgctcctggcgagcctgagcttgccacccggttctccctgcccgactaagcaaaagga

SEQ ID NO: 623 - DNA, 269 bp, Homo sapiens
  misc_feature (1)...(269): n = A,T,C or G
tgacgtgaccaaatacaccagcacccggaagatgannaccacagacaggcagatgccggcccagtgccgnggagtacttgttcacaccactcaggattccctggagaaatccccanttcatgctggctgngtcctcggtgcctcacgtggacgtgtgtgtgngcccttgtgtgctaacctctcagactctgggagtcacgaggcctgggagagcctgcnnatggangtctttggagatgatgctgaggactagatggtttcacaacaaa

SEQ ID NO: 624 - DNA, 266 bp, Homo sapiens
  misc_feature (1)...(266): n = A,T,C or G
cccccaacggtccagctcatgatggaggccatcangaanaagatgcngatgctgaagttagacaaagagaatgttctggaccgagctgancaagctgaagctgagcagaancaggctgaagaaagaagcangcagcctagaggatgancatagcaaccatgcagaagaagcctganngggacagaggatgagctggacaagtattcggaagctttaaaggatgctcaggagaagctggagctagcanagaagaaggcagccgacaa

SEQ ID NO: 625 - DNA, 265 bp, Homo sapiens
aactgagcagcagcaggaggaaattgctaccaagaagctccgattaacaaagccgagcaaatctgccgctctccacatagatctgtgtaaagccacctccccagcagatgctttgcagtacctactccagtttgccagaaagcctgtagaagcagagagtgtggagggggtagtcaggattctcttggaacattattacaaggaaaatgatccatctgtgagactgaaaattgcatcactcttgggattattatcaaaaaaaaaa

SEQ ID NO: 626 - DNA, 265 bp, Homo sapiens
  misc_feature (1)...(265): n = A,T,C or G
catactgcagcctgctgttaaggntacctataaaaagggccttgataggcctttctaattctcctaaaggatatgtncgcncaacatggnacaccagcaagtnacttgattgaagtatttgttgatggtcagtctgtcatggnggaaccaggaaccactgttctgcaggcttgcgagaaggtcggcatgcaaatccntcgattctgtttaccatgaaaggttgtctgttgctggaaattgcaggatgtgcctggtagagatttga

SEQ ID NO: 627 - DNA, 262 bp, Homo sapiens
  misc_feature (1)...(262): n = A,T,C or G
actttacatcacatgctgcctggnctctaagcagtggaataaggtgataagtgcctgtacagaggtgnggcagactgcangtaaaaatntgggcctggcagatagatgatnctgntcaggactcattgnactggaaganggtttatttgaaggctattttgaggatgaagcaactggaggaccatgaagcctttgagacctcttcgttaattggacatagtgccagagngtatgcactttactacaaagatggacttctctg

SEQ ID NO: 628 - DNA, 261 bp, Homo sapiens
  misc_feature (1)...(261): n = A,T,C or G
ttttatatgaaggtcgaactggggttttagctgccggncctgtcctccaagccggctccggagaagatgccagatnagagcnatgactaccgcgtggtcgtgttcggcgcaggcggngtgggcangagctcgntggtgctccgctttgnaaaggggacgtttcgtgacacctacatccctaccatagaggacacntaccggcgggtgatcangtgngacaagagcgtgtgcacactgnagatnactggacaccaccggcag

SEQ ID NO: 629 - DNA, 249 bp, Homo sapiens
  misc_feature (1)...(249): n = A,T,C or G
atactcaccatatacntaaaagaacacagngacgcgtagctatgcataacanacanattgatcaaantatattcatagcntttagngaaatttgtaactttaaatataatctacttacagaagcacaggccaaanttccaaaaaatccaactttctgtactagtttttgaactgccagtttagcccgtgatgcaaagtcctgtaaaacaaatgttttgaaatattaattaaaagtacaaagaagaaaaa

SEQ ID NO: 630 - DNA, 248 bp, Homo sapiens
  misc_feature (1)...(248): n = A,T,C or G
gactgagcacaattcattgaattgggtgacaacaggacagagattgttacagaagtgcaaggaacttatgaagaaagctaggctagnatgcaanctgagngctgnccaagctgttccacaagaattccagacagcttttcaagatctcccaaacacattggatgaaatcgatgcattattaacctgtttatatgtgtccgcctcgcgtcaagtgaataaaagttagcagatttattgaaaaaaaaaaa

SEQ ID NO: 631 - DNA, 248 bp, Homo sapiens
  misc_feature (1)...(248): n = A,T,C or G
ttttggctttggccagtgcccgggaagaaaggtgacgactgcctgatgaagaccacgtgcnggcacaccctgagtacattgctcctgaggttctggtgcgaaaaccctacaccaattccgtggatatgtgggcactgggngtnattgcctacatcctgctcagcggcaccatgccctttgaggatgacaaccgcacccgnctataccggcagatcctcaggggcanatacagttatctgggggaaaaa

SEQ ID NO: 632 - DNA, 248 bp, Homo sapiens
  misc_feature (1)...(248): n = A,T,C or G
gactgaggctgcctgctgtctcccggggngnacatgaaacgaggtcgccttcccagcagcagtgaggattctgacgacaatggcagcttgtcaacgacatggtcccagcattctcgatcccagcatgggaggagtagtacctgctctagacctgaagatcgaaagccttctgaggttcggaacctcacttacatggtgacccgcagggaaaagattaaacggtctgtgnncaaagtcaaaaaaaaaaa

SEQ ID NO: 633 - DNA, 246 bp, Homo sapiens
  misc_feature (1)...(246): n = A,T,C or G
ctcttatggtagtaggtgatgctgatcnggcgnnagtnggcattaatcaactcattattcctcacagatttgtattctncanagcatccangaccttctcatagaatcaaaaagactgtncaggtggagcantccaaagttttaatcaaagaaggtggtgttcagntgctgctgacaatagntgatactccaggatttggagatgcngnggataatagtagttgctggcngcctgttatcgactac

SEQ ID NO: 634 - DNA, 246 bp, Homo sapiens
  misc_feature (1)...(246): n = A,T,C or G
ggcagagctgtgtgttctataccgacagcactgaggacggnatggtcagtgagctcatcgncttctgcaccagtgcggagaagacatgccttacctgtagacntcctgaacgtcttttgaatacagaggttctgaacanaaaactctncaaagcctggcacagtcgccttcaaatgacagngggcatgcaggaaccagagacattgntnntatacaagagctgtatccttttctgaaaaaaaaaaa

SEQ ID NO: 635 - DNA, 244 bp, Homo sapiens; identical to SEQ ID NO: 26
  misc_feature (1)...(244): n = A,T,C or G

SEQ ID NO: 636 - DNA, 236 bp, Homo sapiens
acaagcctgtcccaacctcaaaatggagatgtgcctaaagaaacaggaaaaggtggaaaagtgaaaaaggccctgaaacgttctgtgcctgtggactcagcagaagcacaaagtggaggcatgcctgaggagaccttggaaaatggcaaagttaaaaagtcaccccagaaactcacaactttagccaacggagaagcagcaccaacaccacctcctgattcagaagtaaaaaaaaa

SEQ ID NO: 637 - DNA, 235 bp, Homo sapiens
  misc_feature (1)...(235): n = A,T,C or G
ccatatataagtttcctattgttacccatattcaccacctaccttganattcttgtccaaggngtggcaccccacatttatgagannggggatgtntgcgctttcantncttcntccgcctgtaagangaccngnatagngnanagctaccctntgaaaggacggaaccntacatcagatcagttaggactatcctgttnancancgatctcanatgcttaatgagcccaacacc

SEQ ID NO: 638 - DNA, 233 bp, Homo sapiens
  misc_feature (1)...(233): n = A,T,C or G
gactgaggggtcccttcagtgttgtacggcgatgtatcaacagagaaactgggcaacaatttgctgtaaaaattgttgatgtagccaagttcacatcaagtccagggttaagtacagaagatctaaagcgnnaagccagnatctgtcatatgctgangcatccacacattgnnnagctgntggagacatatnnntcagatggnatgcgtttacatggttcttgaattgagagt

SEQ ID NO: 639 - DNA, 230 bp, Homo sapiens
  misc_feature (1)...(230): n = A,T,C or G
ccaaacggtgcatttagtttnagcgctntatngagaattactaggcagccacattgnatgngtggngggnatatacaccntgnatggnncnctnttcctggagagagcctactactatgcatttgcagcacaccacagcggcatcaccgataccacccgtgtaggcatcatcctgtcccggggcacggcggccagcatctcctttatgttttcctacatcctgctcacca

SEQ ID NO: 640 - DNA, 226 bp, Homo sapiens
  misc_feature (1)...(226): n = A,T,C or G
ggtcatttgaacgaatattnaaaacgtttggaaaatccacaggaatgggtaggacaagtggaaataagtgccctttcacattatgnacaggaaagattttgtaatatatcaggagccaaatgtttctccttcacatgtaacgtgaaaataattttcctgagaaggtgttactgtgtttttcaaatggaaatcattatgacattgtctatcccataacatataaaaa

SEQ ID NO: 641 - DNA, 225 bp, Homo sapiens
  misc_feature (1)...(225): n = A,T,C or G
tgaagatgttgcggtgntnnaaacatgataatgtactctctgcccttgacatactccaacctccacacattgnctattntgaanaaatatatgtngtnacagaatngatgcacagtgatctacntaaaattatcgtntctnctcatccactcngctcggatcatgtnaaagttnttctttatcanattntgcgaggtttgaaatatctccattcagctggcattt

SEQ ID NO: 642 - DNA, 225 bp, Homo sapiens
actgagacaaccaaaccaaagcgcctgacgatttagttgctcccgttgtgaagaaaccacacatctactatggaagcttggaagagaaagagcgggaacgcctggccaaaggagagtctgggattttgggaaaagaaggactcaaagccggcattgaagcaggaaatattaatataacatccggagaagtgtttgaaattgaggagcacatcagtaaaaaaaaaa

SEQ ID NO: 643 - DNA, 221 bp, Homo sapiens
  misc_feature (1)...(221): n = A,T,C or G
ctctgaacagtatgagattcatncagaccaacntctnccanctcctgaaggacacctgcacacagctgcttgctctgaagccctgnatcngggaaggcctgccagaatttctctcggtgcctggaggtgcagtgcccagtcggactcctncnccctgnngcccccaaggangncccatagcnccnataanccacggagctcccanaaccttggcccaggca

SEQ ID NO: 644 - DNA, 221 bp, Homo sapiens
  misc_feature (1)...(221): n = A,T,C or G
ctggacgaggatgtctttgatncnttcagacacatccnatactcgcggntnacacggtatattcagcaaaacattgncncagacatgggnanngaatcttgaattttctactcaatacgcttcaggaaaatgtaaacaagtaccaacaaatgaagacagattcnnctcaggaggcagaggctcaagccaactgtngngtaagcgtggcggacctgaacact

SEQ ID NO: 645 - DNA, 220 bp, Homo sapiens
  misc_feature (1)...(220): n = A,T,C or G
gagcctgtgctggggangtggtggatgcagcatccccagcctccaccgtgaatcatcttcgctgggatctgagcgcacagcagatcagggctctaaccacgcagctcatcgagcagaccaagtgtgtgtactgaccgagtgggtgctcagaacttcgaggatgtgtccgtatgagagcacacatgaaggcacgtggctgacgtggaggtcacctacacag

SEQ ID NO: 646 - DNA, 217 bp, Homo sapiens
  misc_feature (1)...(217): n = A,T,C or G
ctgaggccagatcacttgaatggacatatcaagcaggtgcacacttctgagcgacctcacaagtgtcagncntgggatgcctagctttgcnantcctgaccccctgggctctcannttacctnncttgaatactggganctcctgccaggcgggtnnnangancgttgcggncnncatacatggaanaccacctgaanatncactatagaggggccc

SEQ ID NO: 647 - DNA, 215 bp, Homo sapiens; identical to SEQ ID NO: 27
  misc_feature (1)...(215): n = A,T,C or G

SEQ ID NO: 648 - DNA, 214 bp, Homo sapiens
  misc_feature (1)...(214): n = A,T,C or G
tcactcattctaaggangacacacgaggtacaagctgnagccaaaatggatctggncatggncaaaccngtggncaaaatgcaagtagaagaggnaaancanancaggaaaaagtctcccgtcgctgatcttctcccacacatgcctcacataagcgaatgtttgatgaaaagaagcttaaagcccaccgacctgagagacatgactatcgtaa

SEQ ID NO: 649 - DNA, 213 bp, Homo sapiens
gactgaggctttgctggtccttctcagttagatagcattgatctctggaatcctgacgctcctgtagagacattctgggaaatcagctcacaaatgcttttttacatctgcaagaaattaactagccatcaaatgcttagtagcacagaaattctcaagtggttacgggaaattctgatctgcagaaataaatttcttcttaaaaataaaaaa

SEQ ID NO: 650 - DNA, 213 bp, Homo sapiens
  misc_feature (1)...(213): n = A,T,C or G
gactgagtgaagccccaagtatctgactgaagctctccagtctgtcactgaattggagctagaggagaacctaggaaagatcatcgatgcagttgaaaagcagcccttgtcctcnaacatgatcgaacgatctgtcgtggaggcagctgtgcaagagtgcagtcagtctgtggatgagactatanancacggttnncaatatcattggagctt

SEQ ID NO: 651 - DNA, 211 bp, Homo sapiens
  misc_feature (1)...(211): n = A,T,C or G
aaatgtgaatgcggaaatccttgttgaanctgcccgcagaacacctgagttaacattgtcaggtttctacatgcgcgtgccaaccacagcccncttgaccttcataccatgttcagagccatataaagccgagtattgtgggtgtggaatttttctccaatgntattataaaacctnaacantaaaggtgagagacatgcccaaagaaaaa

SEQ ID NO: 652 - DNA, 209 bp, Homo sapiens
  misc_feature (1)...(209): n = A,T,C or G
tggacgacatgatgacctcactnaagaaagntgngaaggagacatcgtatgagatgatgatgcngngngtatcgctgaatgctggcccatcccttacacagtgatctcgatgcngatgcatggtgcagntttgnggnacgggaggccaagtacagnggggggcntgagttctattgggaanancttcnaggaagaggggcctgctggga

SEQ ID NO: 653 - DNA, 209 bp, Homo sapiens
  misc_feature (1)...(209): n = A,T,C or G
ctgagtgcttcgctgctgcatctgaatcagaagcagctggagaggtggcggactggtcagcggcttntgcttcactcagaggacagccttctctgactccttttccctttccttgaagcccagcaggatcactacattcctgcaactgtataaatagcaaattagtaattgtttgaagcaacagaattgaatcaattgaaaaaaaaaaa

SEQ ID NO: 654 - DNA, 209 bp, Homo sapiens
gactgagaaaataccaatatactacatcttctttcaaagggaagtttaaaactgaagttcaaaaggcagaagaagcagtaaagagggctgaactcctgtttaaagaggtgcaagccaaagtaaaccagccggacagaattgctttgtcttctacccaggatgcattacagaaagctctgcaagacgtggacacaaagcataaaagtctt

SEQ ID NO: 655 - DNA, 208 bp, Homo sapiens
  misc_feature (1)...(208): n = A,T,C or G
tgagcatctcgacattnaaccattgagcnttgagacttctttcccctacgangtgcnnaacattaanatttgctgactnnagnatgcagttcactggtanagtgatagagcacctgccgggcagtcataaggtccaggtctctttccagagcacctgcanaaaggtccacatagagagctttgaaattatcttctaccacaaaaaaaa

SEQ ID NO: 656 - DNA, 208 bp, Homo sapiens
  misc_feature (1)...(208): n = A,T,C or G
gactgagctgtggacaactattttcatctggcagttgcctttatcactcaggactctctgcagctggagcagttcacacacgctaagtacaacaaaatcctgaataagtaccggggacatgagacggctcataggattctccatccgtgatatgtggtacaagcttgngcagagcgnatgctgagagntttctgcatcatggctgaca

SEQ ID NO: 657 - DNA, 200 bp, Homo sapiens
  misc_feature (1)...(200): n = A,T,C or G
gaatatgaccctgatatgctataggaggagaacgttatanaaccgaagtctgtgcagttcctggtacagcanggcttcaacttcaaccggcagtacgcccagggtatcctcctaccataagggcaatgacaagggagatgagagccagagccagtcggtacggacgctgttccttgaactgattcgggcccgacagcccg

SEQ ID NO: 658 - DNA, 199 bp, Homo sapiens
gtttaaacaagttattccagcagatctactcagacggttccgatgaagtgaaacgtgccatgaacaagtcatttatggagtctggtggtacagtcttgagtaccaactggtctgatgtaggtaaaaggaaagttgaaatcaaccctcccgatgatatggaatggaaacagtactaaataaatcaatttgctatcactgt

SEQ ID NO: 659 - DNA, 187 bp, Homo sapiens
ttaaagaggagagctacttgtgtatagtccatatttattgccttcagataattggcttgaagatgcacccggtgaaccccttcggagggcagcagcccagtgcttgattaagagtggcctagagaagttggaagaccgtgtgagaagttcttctttatagagaattaaacatgaaaattacatctca

SEQ ID NO: 660 - DNA, 184 bp, Homo sapiens
  misc_feature (1)...(184): n = A,T,C or G
gccctcactgtgacgagggnaggcctcacacntgtgaccgagaggaagcaccctcatcagnccgaaaggtcgaggctaagatgagcattaccagcgacganngcagaactantctggtatatcgctacctccaggaatcaggnccnttcccactctgccttcacgttngggatcgaaagtcaca

SEQ ID NO: 661 - DNA, 179 bp, Homo sapiens
gccccagagccagagaatggtggctacatttgccacccccggccttgtaaagaccccttgacagcaggcagtgtcatcgagtacctgtgtgcagaaggctacatgttgaagggtgactacaaatacctgacctgcaaaaatggcgagtggaccgccagccatggaggttagcctgtcat

SEQ ID NO: 662 - DNA, 178 bp, Homo sapiens
gactgaggtgctcttgaggagaactagccggcgcatttgcatctctgttgtgtctactgaaaccacttctgtctgttcggggatatctatttgagatttcatcttctggggcactggttgtgctgtggaaataaaagtgaatagtatataaacattgtgggcaccctaaaaaaaaaaa

SEQ ID NO: 663 - DNA, 173 bp, Homo sapiens
  misc_feature (1)...(173): n = A,T,C or G
catcgagacatcaagggagccaacatcctcatcaacgactgnggggaggttaaagctggctgactttngggatctcagcccagaattggggcgacacctggcccgggcgcctttntttnattggngacacccggtactggatggctccnagaggnggcaagcggtggcccctg

SEQ ID NO: 664 - DNA, 170 bp, Homo sapiens
  misc_feature (1)...(170): n = A,T,C or G
gactgagagatctgagcgaaaaccagntccagggcatcccgaggaaggcgttcagaggcgtcacaggcgtgaagaacctgcaactggacaataaccacatcagctgcattgaagatggagccttccgagcgctgcgcgatttggagatcctcaccctcaacaaaaaaaaa

SEQ ID NO: 665 - DNA, 170 bp, Homo sapiens
  misc_feature (1)...(170): n = A,T,C or G
attatctacttacactatttacatgggaaaggataaatatgaaaatgaagatctgataaagtatggctggcctgangatatttggtttcacagtggacaaactctcttcggcccatgtgtacctacgattacaaaaggcagcannanagctagcgcatgccaatggcctt

SEQ ID NO: 666 - DNA, 159 bp, Homo sapiens
  misc_feature (1)...(159): n = A,T,C or G
gactgagaattcatgctgaagnncagctgaaggactacgggaggttccttgaggagtncacatctaagntganaagaattgaggacgccctanatgatttgattggctgatgtttgggatttcantcttgatcctatagcattaaaggtctgaatgtat

SEQ ID NO: 667 - DNA, 156 bp, Homo sapiens
  misc_feature (1)...(156): n = A,T,C or G
gactgagtttaagaggaagttaaaaggctttggttcatcantaacctagtcacaaaaatacatatcaaccactggttgaatttcgatcaagaggaaagaatggagaagaagattggttccaggtcttttagggatggtgtggttaagaaaaaaaaa

SEQ ID NO: 668 - DNA, 151 bp, Homo sapiens
  misc_feature (1)...(151): n = A,T,C or G
agcttcccccagcacaggtgacgatgatgaccctgttnnggacnaaaagcagtcacaaatagcagtggcatntttnccaangnagccaccaatatcatgagggccgnggcctgttccagcatctaacncacccttacccttctgaagaaca

SEQ ID NO: 669 - DNA, 151 bp, Homo sapiens
acatcaaccctcatactccaattcaacaatcctgggaagtgcttaatgaggagggggacactgtatggtcgaccaccgcagtacaacccccatggacctggtggcccgacctcacacctgatatttgtaagttagtagcagggtcacagcc

SEQ ID NO: 670 - DNA, 137 bp, Homo sapiens
  misc_feature (1)...(137): n = A,T,C or G
catctacactagctgaaaatgctggcctgaatcccatttntacagtaacagagctaagaaaccgccatgcccaaggagaaaaaactacaggcattaatgnccgaaagggngggatctccaacattctgaaggaaatg

SEQ ID NO: 671 - DNA, 132 bp, Homo sapiens
  misc_feature (1)...(132): n = A,T,C or G
gaggagtctgtgaagtttgaagatgtatctctgncatttaccgaggaagagtgggcacagctggacttccaacagaagtgcctgtacagggagatcatgatggagaactacagcaacatgatttcagtgggt

SEQ ID NO: 672 - DNA, 122 bp, Homo sapiens
  misc_feature (1)...(122): n = A,T,C or G
agactgaggtgtctgactcaggncaagcggntcccaccctccagatctcatggaggcggtgacctttggcgacgtggctgtgcacttctctcgagaggagtggcagtgtctaaaaaaaaaaa

SEQ ID NO: 673 - DNA, 118 bp, Homo sapiens
  misc_feature (1)...(118): n = A,T,C or G
gactgaggctctatggtccccttttcgatgcntattttgcatgcagaactgcagcagtatctggggaacccacaggagtccctgnnccgattacacagggtcaagaccgtctgcagca

SEQ ID NO: 674 - DNA, 109 bp, Homo sapiens
  misc_feature (1)...(109): n = A,T,C or G
tctttccttacctctatgngccatacggatggttatggacagcagccagaaagctatctttctnagatggcnttcagtntcgacagagcaccntaatgtggctttaggc

SEQ ID NO: 675 - DNA, 107 bp, Homo sapiens
  misc_feature (1)...(107): n = A,T,C or G
gccttgctcatagaaaatggggttgnngngggagccccaggtggagggggacaacacgggaggcctctatcactgncgaacaagcagcgagttctgccagccagtca

SEQ ID NO: 676 - DNA, 102 bp, Homo sapiens
  misc_feature (1)...(102): n = A,T,C or G
gactgaggtggaagangaaactgttttacataacattccttatatgggggatgaagttctggatcaggatggcactttcattgaagaactaataaaaaaaaa

SEQ ID NO: 677 - DNA, 376 bp, Homo sapiens
  misc_feature (1)...(376): n = A,T,C or G
gacttatctggctctactgatggcgagcaactcnananggaacccgacttnttncaggaagacgaagaggaagcgatgacattggccctacctgagggaccccaggagttagacatggacagtcccatggagagcagccaaggcccggagggctctgtcaagggttgtggcgaggagaaggagcctgagctggcgggcctgttcctgccagaggacaagtgcctcgtcctcactccatctgtgaccacatcagacctttccactcactccaccgcctctcttatcagcaacgaggagcaatttgaagactatggcgagggggatgacgtggactgtgctcccagcagcccatgccccgacgatgagaccagaacca

SEQ ID NO: 678 - DNA, 318 bp, Homo sapiens
gaggtggggtctttcaaggaggctaaacgactaaaagaattcctagaagattatgatgatgatagagatgacccgaagtactacaggggtagtgctcttcagaaacggttgcgtgatagggaaaaagaaatggaagctgatgaacgagacaggaagagagagaaggaagagcttgaggaaatcaggcagcgcttactggcagaagggcatccagatccagatgcagagctccagaggatggaacaagaggctgagaggcgcaggcaacctcaaataaagcaagaaccagaatccgaggaagaagaagaagaaaagcaa

SEQ ID NO: 679 - DNA, 316 bp, Homo sapiens; identical to SEQ ID NO: 28
  misc_feature (1)...(316): n = A,T,C or G

SEQ ID NO: 680 - DNA, 128 bp, Homo sapiens
gactgagattatttgtataactttgcaagtgctgcaacaaagaagataactgaatctgttacagaaacagctcagacaatcaagaaatccgtggaagaaggaaaaatagatgatatccttgacaaggc

SEQ ID NO: 681 - DNA, 187 bp, Homo sapiens
  misc_feature (1)...(187): n = A,T,C or G
tgaggataccctcaggcaagttcgctgcacccgaaagctgcggagctggatcgtggagcaggtggagagtggccatttnccaggggtgtgctgggacgatgcagccaagaccatgttccggattccctggaagcatgcaggcaagcaagacttccgagaggaccaggatgctgccatattcaaggct

SEQ ID NO: 682 - DNA, 367 bp, Homo sapiens
agacaaaataacaaccacaggtgctactggagggcttaatgaatctactggcaaggcacctctggtaccaacgcagagagagcgtgggacgaagcctcccttagaggaactgtccacctcagcaacctcagaccatgatcacagagaacacgagagtacaaccactgtcaaagtggtgactagccactctgtggacaagaaaacaagtcaccccaatagagataatgcaggggatgaaacgcagacaacagataagaaagatggcttgccagtagtcaccctggttggaatcatagttggcgtcttgttagccattggcttcgtcggagggatcttcattgttgttatgaagaagatttctggaagg

SEQ ID NO: 683 - DNA, 232 bp, Homo sapiens
  misc_feature (1)...(232): n = A,T,C or G
atgagccacagacagggggagtcgncccagagagtccggaatgctcagtgcttgtcggttccaacagaaaagaagcacagcagcattctaagtgtcccagagcacaggcccacatctaaggagcaggancaganggtggtggtgaggcccgtcctcttccaggtcccggtcctcaggccccgacccaccccagtatttccttgcattccccttttttttttttttttttttt

SEQ ID NO: 684 - DNA, 425 bp, Homo sapiens
  misc_feature (1)...(425): n = A,T,C or G
aaggcagcatgaatagtggccctggccctgtaggaggcaggcctgggggccgagggggaccagccgttcagcagaacattccttccaacctcctccaggaccatgaaaaccagagactctttgagcttnttggccgaaaatgctggacactggctaccacagttgttcagctctacctggcactgccccctggagctgagcactggaccatggaacactgcggggctgtgtgcttcntgaaggataaccctcanaagtcctacttnatccgcctttatggcctacaggctggtcggntactctgggaacaggagctgtactctcagctggnttatctcactcccaccccggtcttccacacttttgctgnagatgactgtcaagtaggactgaactttncggatgagagttgaaagcccaggcct

SEQ ID NO: 685 - DNA, 560 bp, Homo sapiens
  misc_feature (1)...(560): n = A,T,C or G
actgagatgcccagtggaactatccctggccagtncacagantaaccagatgacatngccaggcnaaacccttacttctcattctccgcaagaagccacaaattctccgaagccacagccaagctatgaggagctggaggaagaagaacaggaggatcagtttgatttgacagntggtatcaccgatcctgagaagatcggggatggtatgaatgcctatgtagcctacaaagtcaccacacagacaagcttaccgatgttcagaagtaggcagtttgcagtgaaaagaagattcagtgacttcctgggtctttatgagaagctttcagagaagcactcccagaatggtttcattgtgcctcctccacccgagaagagcctaataggaatgacaaaggtgaaggttgggaaggaagattcttcttccgcagaatttcttgagaaacggagggctgctttggaaaggtaccttcaaagaattgtgaatcatcccaccatgttacaggacccagatgtcagggagtttctggaaaaagaagagctgcctcgagctgtccccc

SEQ ID NO: 686 - DNA, 542 bp, Homo sapiens
  misc_feature (1)...(542): n = A,T,C or G
gactgagccacagctccctgcttggnggcggaggggtggacggctgcattcatcgggccgcgggatccctgctcacggacgaatgccgcaccctacagaactgcgagaccggcaaagccaagatcacttgcggctatcggctgccagccaagtatgtcatccacacggtggggcccatcgccgtgggccaacccactgccagccaggcggccgagctccgcagctgctacttgagcagcctggacctgctgctggagcaccggctgcgctcagtggctttcccgtgcatctccacaggcgtgtttggctaccccaatgaggaggctgcagaagtagtgctggcttcgctgcgggaatggctggagcagcacaaggacaaggtggatcggctcatcatctgtgtgttcctggagaaggacgagggcatttaccgggagcgccttccccattatttcccagtagcctgaggntcccacatcccaccctgaacaggactgacccacccgggcctgtaggaattcgttcccagctttgagaggtct

SEQ ID NO: 687 - DNA, 248 bp, Homo sapiens
  misc_feature (1)...(248): n = A,T,C or G
actgaggctcggccatttctccatgacgacncagaagtacggcgctctcaggtccttacctcataatccacatgcaattggattgcagagcatttgngggacacaagaggaacaacagaccaagacccttgaacctcccacagagaagctccaggcagtcgcatccttcagggtgtctctccctgtgtcatttgctgcagctggcttttcagggctggggatggaactctgggactcctgcatgttgc

SEQ ID NO: 688 - DNA, 511 bp, Homo sapiens
  misc_feature (1)...(511): n = A,T,C or G
cagtcagatccgcgcctgtacagccgcttcaccagcctngacaaaggggagaacgggactctcagccgggaagatttccagaggattccagaacttgccatcaacccactgggggaccggatcatcaatgccttcttctcagagggagaggatcaggctnnctnncgaggattcatgagaccannggctcattnccgacccnttgcggataccgaaaagagcangagatgtgaatggcccggaaccnctcaacagccggagcaacaagctgcacctttgctttcaggactctatgatttggatataagancacaagatctcnctgtgangagcntgttacaggtacatgcgaatgatggttggagtgaatatctnggatgagcagctgggcagtattgcggacaggaccatccaggaggctgaccaagatggagatagtgccatatcttttacagaattcgttaaggttttggagaaagtggatgtagaacagaagatgagcatccgattt

SEQ ID NO: 689 - DNA, 404 bp, Homo sapiens
  misc_feature (1)...(404): n = A,T,C or G
gaaaaggtgtttgatgncatcatccgctgtttcaaacgccatggagcagaagtgattgatacacctgtgtttgaactaaaggaancactgactggaaagtacggagaagactcaaagccttatctatgacttgaaggaccagggtggggagcatgctngtccctccgttatgaccttacctgtncctttnnctncctgtntggttatgacttntnctgacnagcatntnacnctaccatatntcaaaggttgnatcacacgggacaccccagctatgacccgnggccgctaccgcngannntnnnactgcgatcttnacantgccggacaggactnaccccatgantcctgatgcagagngcctaaagantatgtgccgagatcctgngctttacttcagatca

SEQ ID NO: 690 - DNA, 317 bp, Homo sapiens
  misc_feature (1)...(317): n = A,T,C or G
gactgagtttatcatgcaatctacttggcagaaatggttgcctcagaagttgctcgaaaacttgcctccgtgtttaatattcctttccaccaaattaaccaggtttacagacagggccccactggtatccacattcttgttagtgaccagatggttcagaactttcaagatgaaacttgttttttattctccacagtaaaagctganaataatgatggtattcacataattttgaagtgataccttaaacggactgaactctatccagtaccaaataaagtcatgcttaaaagtgtgtgaagactgaaaaaaaaaaa

SEQ ID NO: 691 - DNA, 505 bp, Homo sapiens
  misc_feature (1)...(505): n = A,T,C or G
tctccatacggttttcaagnatgggaaggtgacaaaaagctactcatttgatgaagtcagaaaaaatgcacagctgaacatcgagcaggacgtggcacctcattaggcttcatgtggccgggttgttatgtgtgcagtgtgtgtatacatacatgcacgtatgtgtgcacctgtgcgtatgtactaacatgttcattgtacagatgtgtgggttcgtgtttatgatacactgcagccagattatttgttggtttatggacatactgccctttttatttttctcccagtgtttagatgatctcagattagaaaacacttaaaaccatgtacaagattaatgctgaagcaagcttttcagggtcctttgctaatagatagtaatccaatctggtggtgatcntttcacanataacaaaccangaaaccttttatntataactaccagatnacataanacagatttgcataaaatnaccatgcctgctttatgtttatatttaacttg

SEQ ID NO: 692 - DNA, 161 bp, Homo sapiens
  misc_feature (1)...(161): n = A,T,C or G
gaaaggcagcatgattgagaagtgggagcaggatactggngagcaaggncaaaggtgagaccagggccaaactaaaaaggtcacagagtttcggtgtngccagnnccancagnntcagacagatcctgctagagtggtgcngcagcaagactgagggctat

SEQ ID NO: 693 - DNA, 343 bp, Homo sapiens
  misc_feature (1)...(343): n = A,T,C or G
tgcgcacacacgtcagccgctgtcaagngtgcatgagaagaacataactatgatgctcgcctntgccaccgtnacaacatggtgctactcccccccttgtcctcttctccctcccattgtatttgtaacagcantgaaccctagaattatatcctgtgnacctcactgtccactatgaaaaccataaagtgccttatagggattcgcgtaactaacacaccccgcttcgttggcctctgtttgctgaaggagaaggacaggcagcggagagctttccataatggcacataccaaatggcgctcctgatccaataaaagatgaattgcatttttgcaaaaaaaa

SEQ ID NO: 694 - DNA, 519 bp, Homo sapiens
gactgagggaagagtgaggatacggctcgggtaaatcgagcatgtcatgtaccacgattggcgtttggtacccaagcacgaggaggaggccttcactgcgttcactgcgaaaccagaggacagattgaattctgtcccctatccacctctgctgcgagccatgatcctcgctgaacggcagaaaaactggggataccagcgtgcaggagccgctcctgaacctggagaggactcgaatgcgcccctgggactaccctgcaaaacaggagacgaaagggagggccaagggcaccccagtctaactgccaggactggcagagaggtcctgtgagtcatttgatggacgagtgcctttgactgtgctagatcttcacttcggtggcgagttatatcctacagccctgacacatcaggcaatgaataatggggcagatgacaggctgcttggtgtcattttcaggcgggcccctctctgattcctcggtctggaaataaacgccaggaaacagccaaaaaaaa

SEQ ID NO: 695 - DNA, 185 bp, Homo sapiens
gactgagaatgagaaagaagtttgatgatggagaagatcctcttgatgcagagagtcaacaaggaggtggtggcaaccccttccacagaagttggaactcatggcaagggtttaaccccttcagctcaggcggaccgttcagatttaagttccacttcaattaaaccagctattttacttgctca

SEQ ID NO: 696 - DNA, 202 bp, Homo sapiens
  misc_feature (1)...(202): n = A,T,C or G
gactgaggggctgtttttggagcattgcaagncattcttgggagccgctccatttcaaaggaatactataaccagacgggccgcatacctgactggtgctctctcaacaaccctcccctggaaatgatgtttgatgtggggaaagcgcaaccaccgctgatgaaaagggcattttccactgagaaataaacgcttgaataca

SEQ ID NO: 697 - DNA, 478 bp, Homo sapiens
  misc_feature (1)...(478): n = A,T,C or G
gactgaggtcctggggtgggctcaggcgaagcgnggcnnagtcgnnctncncatgcatggggtctacacgcacntcctagcggnacttgtcctccacccanactggatatcnnacatgcgcctcaggaacacgtgaagttatgagagagatncaaaaactctatgaaaacaagtcatttcttttcttgggttgtggctggacagtggacgacaccactttccaggccctgttcctagaggccgtcaagcataaatctgacctagaacatttcatgttggttcggagaggagatgtagatgaattcaagaagcttcgagaaaacatgttggacaaggggataaaggncatctcctatggaaatgactatgctgatcttccagaatatttcaaacgactgacatgtgagatctccacaagaggcagatcagcagggatggcaagagaaggtcagctaaatggttcatctgcagcacatgg

SEQ ID NO: 698 - DNA, 477 bp, Homo sapiens
  misc_feature (1)...(477): n = A,T,C or G
ctcgtgtgtgccagtgcagctatgagctgttctccagtcactcgaagtacgcacactcatccccgtggccagcgttcactgaaaccatccatgcagacagtgtgaccaagtgccctgagaaaaaccgaccagaagctttaaaggtgtcctgtggcaagtgtggcaatgggttgggccacgagttcctgaatgatggccccaagcggggacaatcgagattctgactatttagcagctcactgaagttcgtccctaaaggcaaagaagctgctgcctcccaggggcactaggacatggactgcgaatggcctgccccctgccccctgccccctgtcccctgccaaccgctccagcctcagtcaccgaatgatctgctctggtcaaatccttctatgccagccagggtggtgatgacccgtgacctttgaggaggggagtaggttgataccggnaactcttggatccttgccttctggc

SEQ ID NO: 699 - DNA, 192 bp, Homo sapiens
cagtaatgaaagtaacagttgatgtccctcctcgacaaaaagagcaaagaagtgctgcagcaaaagccaaattcacagtggatttagactcggatgaagatttctcaggtttggatgagaaggatgaggatgaagatttcctcccattagatgctactccacctaaggccaaaatccccccaaaaaaaaaaa

SEQ ID NO: 700 - DNA, 497 bp, Homo sapiens
  misc_feature (1)...(497): n = A,T,C or G
atcttggcatgttggtctggtcacctaancagagnctttctgaagcanaaccnngcgngtacanntgtatagcanacagagaagcaccgncaacnncatgnagcagnctctngngatgctnattttggnntangcanannnttggaaantcattgancgacttgnccaacattcaccccntttccagatgagtggactgtagaagacaaagtcttatttgagcaagcctttagttttcatgggaaaacttttcataggatccagcaaatgcttcctgataaatccatagcaagtttggtgaagttttactactcttggaagaaaactagaactaaaacaagtgtgatggatcgccatgctcggaaacagaagcgggagcgggaggaaagtgaggatgaactggaagaaacaaacggcagtaatcccgntgacattgagattgacccaaacaaggaaagcaaaaaggaggtgcccnctacagagacagttcccatatt

SEQ ID NO: 701 - DNA, 247 bp, Homo sapiens
  misc_feature (1)...(247): n = A,T,C or G
actgagttggtcgaattatgtttcagctcttctcagncatatgtccaaaaacatgcaaaaacttcctatgcctgtgctcaggggagaaaggccttgggaaaacaactgggaagaagttatgttataaaggttctacattccaccgtgtggttaaaaactttatgattcagggtggggacttcagtgaaggtagagataaaagttatattcctaataaatccatccatcagaatctcaaaaaaaaaaa

SEQ ID NO: 702 - DNA, 222 bp, Homo sapiens
atacgctggaacaaggactttggagacaccactgtttaaaggaatggatgcctctgtgagcccatagaacatcgcacttcacaggaaacaagagctttggctacaggaacccagacttcgtttacaggacgttttagagttttcatttttgtgcaccaaacttgaagaggaacaagaagacagacctaaataaaatatgcaatatgaatggaaaaaaaaaaa

SEQ ID NO: 703 - DNA, 105 bp, Homo sapiens
  misc_feature (1)...(105): n = A,T,C or G
ttggggcactgaggcanatcagcatctctgactntgnaggatggtggtgcggaggtgcaccgncctgaccttcacagnctcagaggaccgagtcttggtggctga

SEQ ID NO: 704 - DNA, 428 bp, Homo sapiens
  misc_feature (1)...(428): n = A,T,C or G
gactgagagacggcgagagggacccccacactctaatcngggtccagtatttcctggcacagcattatgataaacttgggcagnattttctggctttggaatatattaatgctgtaattgctagtactccaactctaatagaactattctacatgaaagcaaaaatttacaagcatatgggtaatctcaaagaagccgcacagtggatggatgaggcacagtctttggacacggctgacaggttcatcaattccaaatgtgccaaatacatgcttcgagcaaatatgataaaagaagcagaggaaatgtgctccaggttcacaagggaaggaacatctgccatggagaatctgaatgaaatgcagtgtatgtggtttgagacggagtgcatttctgcctatcagcgcctggggagatatggggatgcc

SEQ ID NO: 705 - DNA, 240 bp, Homo sapiens
  misc_feature (1)...(240): n = A,T,C or G
gatatggagaaatgaagatgtctttggcaacaggatcatccaggtacattnantanaaaacatanagaattnttngaagccaagagttcaaaatgctattgccgacaaagtgaagtctcccaaaaaagttaagaacacanaattgngcctcatcaaagacacaagtgaacagtcacccagtgtcaaagccatgccagggaaagtgtngcaggcaaattctggatctgctacaaaaaccac

SEQ ID NO: 706 - DNA, 395 bp, Homo sapiens
  misc_feature (1)...(395): n = A,T,C or G
gactgaggtgacttcattatctggagtgacacaaggtaagattcaactaaggggtcactgaatcctgaaaatcctgttcaagtaagcatggatcacctaacaacagcgatttatgatcttctcaggctccatgcaaattctagtaggtgttctacaggctgtccccgagggagcaggaacatcaaggaagcatggacntgcaacggagcagcctccagttcactgtctatgccgcacacggaatttccagtaactgggtatcaaagtaagtagctgcttaaaggacatccacagctttacccacacaagttacacttagtgttagtaactacttttatcttttttgtttaaatgaacaatttaaagatcactgggaacccttgtacctttgtggc

SEQ ID NO: 707 - DNA, 350 bp, Homo sapiens
actgagttccttctaatgattctcagtcatgcccgagtgaagaaacacaggaggaggatctgctgaataagtgcatgcagtccatgtccatccaagaacaaggcccagctcacgccagcctgacggtctagtcctccacaccaagctcagccatcagctaacatccacatgctgagtgcacagggaagagtggaccatgtatgggatagtactagtagtaacggtatgttattttggttgttgagaaatttataatagccgccttcgtctgatatatttctgtgttaatgtgtaatgtatgcttgtttctagctagaacaattaaaattttacttgcaacataaaaaaaa

SEQ ID NO: 708 - DNA, 317 bp, Homo sapiens
gactgaggtcctcaagggaagttgaagttgcctgtttgttctgggaggtagcccccacctcccacacctccacgcacattccaggcattcaatgtgtgtatggaaactgggtgagaacttggacctgccctttaaggacacaccgaaggtgtgaggatccagcacaatttatcccgaggcctttgcagcccagccttgccactaggtccaggcaggaatccaaaagggaggggcctcctgcctgcccgccaagcctgcgcacacctctgctctttgtctctggagcctaatcagcctccagatctagaaaaaaaaaa

SEQ ID NO: 709 - DNA, 189 bp, Homo sapiens
  misc_feature (1)...(189): n = A,T,C or G
atttttaacctttcattaccagtnaccntgagcgtttgcntattanttgcttaatatgtacataagttatacatantgattactgaaccggaccatcgnaccatggngtgttngnggctggtgtcatccatgagcccaagccacccaagacgcagggccattagaggtctgccccagctgggatggggg

SEQ ID NO: 710 - DNA, 124 bp, Homo sapiens
  misc_feature (1)...(124): n = A,T,C or G
tgccagccaggcacagccgngaacactggagccatgacaaccagncaccagcctcangacaggnataaggcagtntggcttatcttctttgtgctgggcctggggacactgctcccctggaatt

SEQ ID NO: 711 - DNA, 360 bp, Homo sapiens
tgagacttattgcacatgtgctgtggtcctgagtccctgatgtacacacagaggcagaatttttcctcccaggatgccacatgaggtacctcagccagagccagagcctacctgaggagcttgggaacagcaaacctgaaggcatcgctaatgaccaggctgagggtccccagcaggaaggtggaccggaacacgcgccagatagccctgagtagtgggcccctctgactcctctctggctgcaggaaggcctctgtctcaggggcccccacactactgtgccctttgtgcctggaagagaggaaacatgggcacggggcccaagttatattcaatggctgtagcagaccaacaaataat

SEQ ID NO: 712 - DNA, 238 bp, Homo sapiens
  misc_feature (1)...(238): n = A,T,C or G
tgaggtttatggacctgcgtcagtttcttatgtgcctgtccctgtgcacagcctttgctttgagcangcctacagaanagaaggaccgagtncaccatgagcctcagntcagcgatanagttcacantgatgctcagaattttgactatgaccatgatgccttcttgggtgcagangaggcaaagagttttgatcagntgacaccagangagagcatggaaaggcttggaatgattgt

SEQ ID NO: 713 - DNA, 183 bp, Homo sapiens
gactgagtgattcacatctgagacatggctatggattggctaggcagtattgtgtccatcaactgtggagatagcctgggcgtctaccagggaagagtatcagcagtggatcaggtcagccagaccatttctcttactcggcccttccacaatggggtgaagtgtcttgtaccagaagtcacc

SEQ ID NO: 714 - DNA, 349 bp, Homo sapiens
  misc_feature (1)...(349): n = A,T,C or G
gactgagaataccgctaccaagatgaagacacgccccctctggaacacagcccggcccacctccccaaccaggccaattctccccctgtgattgtcaacacggacaccctagaagccccaggatatgagttgcaggtgaacggaacagagggggagatggagtatgaggngntcncattaanaaggactaangagtcgtgtggatgttcatcttgagcntgggtannaccttcntncacatnngtgacgacccatccatctttatcaccaagatcattcctggtggggctgcagcccaggatggccgccttagggtcaacgacagcatcctgttttgtcaatgatgttg

SEQ ID NO: 715 - DNA, 322 bp, Homo sapiens
  misc_feature (1)...(322): n = A,T,C or G
tgtgaagcgagctcgctggagcatggacganntgcccatgcagacgcgactgcncacntatnctgagcagctcactnagacanangccccggaacnggatntgaaccagcctgaagttatgccatcattgatggangnntanttntgcacccccganaggatcgagctggagaactaccgccgatctgtgaggcaggtggaggagctggaggaggtacccnaggagacncaggccgagcataacctgagcagcgtcttagacaaaggcaccgaagaggatgtggccagcagcagttctgagtcggagatggaggaggaggaa

SEQ ID NO: 716 - DNA, 410 bp, Homo sapiens
  misc_feature (1)...(410): n = A,T,C or G
atgcttgagcgtctgctgcncagcggccgccgaagctgatgcaccagcgtcatcttccagattcctccctcccgacagacacctcctcatcgagaggtactacacctttgatgaggcctttgttcgggaggtcttgggcaagaagctgtccaagggtaccaagaaagacctggatgacatcagcaccaaaacaggaattactctcaagagctgccggaggcagtttgacaactttaaacgagtcttcaaggtggtggaagaaatgcggggctccctggtggacaacatccagcagcacttcctcctctctgaccggttagccagggattacgcagccatcgtcttttttgccaacaaccgctttgaaacaggaaagaaaaagctgcagtacctgagctttggggactttg

SEQ ID NO: 717 - DNA, 364 bp, Homo sapiens
  misc_feature (1)...(364): n = A,T,C or G
gagccgacgtactggatgacccaagctctaaaggatcagcgtcctcagcccgggagcgccaccaccacttaaccccattaagatggcggcagcgcccgctcagccactcagggccgaagcctgcgtcacgtgacccgcacagctctcaccgcggtggctgatgggaggtggagatagaaccgagggtgtcggccattttgtgtctgtttcctgcgggacgcgctggtggcggttggtgtggagaactctgcgagtctcttgggttttttgttttttgttttttccancttntttccgcctctattctggctgttgtgtnggncgcanntatgggttgnttgaacatgatgcagttcaccagcat

SEQ ID NO: 718 - DNA, 513 bp, Homo sapiens
atgatgcactctcctggctttgatggaggcagtagcctgagcttccagatgctgatgaatgcagacagcttgtacacagcggcacactgtgccctactgctcaacctgaagctctcccacggtgactactaccggaagcgaccaaccgtggcaccaggcatgatgaaagagttcatgaaacaggtgcagaccagcggcgtgctcatggtcttctcccaggcctggctcgaggaactgtaccatcaggtgctggacagaaacatgctgggagaagctggctactggggcagccctgaggacaacagccttcccctcatcaccatgctcaccggtcagtgagtaatgccaaggtcatagagtgtgcagtagttgggagaagctgacgttctgggcccttttagaaatgccacaatgcttgaaccggctttgagtaactgttccaggaaggcatcatgaaaacacccctcaagcatttgctctccttttgtcatggacagcctggtgtgctcacac

SEQ ID NO: 719 - DNA, 512 bp, Homo sapiens
  misc_feature (1)...(512): n = A,T,C or G
gccggtccagcaatgacaagcagtgacctgccactgaatttccaaggaagcccttgttcccagatctggcagcacccgaggtttgcagccaaaaagcggagctccatggtgaagtttcactgctacacaaaccactcaggtgcactgacctggttccgaaagcgagggagccagcagccccaggaacntggtctcagaagagggacgcattgtgcagacccagaatggctctgtctacaccctcactatccaaaacatccagtacgaggataatggtatctacttctgcaagcagaaatgtgacagcgccaaccataatgtcaccgacagctgtggcacggaacttctagtcttaggattcagcacgttggaccaactgaagcggcggaacacactgaaagatggcattatcttgatccagaccctcctcatcatcctcttcatcattgtgcccatcttcctgctacttgacaaggatgacggcaaggctgggatggaggaagatcacatga

SEQ ID NO: 720 - DNA, 506 bp, Homo sapiens
gactgagggttagcctggtccccatgaaggttcacggaccatcactgccactcctgaaggcagtccagaagctgtggacttgagtctgattggcctccctccgcccatgtcccagcggcccggcagtgcctctgccacaaggtctattttccgttccatgtctgtggctacaggcagcgagccaagaaaaaaggcactggaggccactggacctggaggcccccgagctatcaacaatcttcgaagatctaacagcactacacaggtcaaccagtcatggacgggctcccccagctcgcttcctccatggatcccaatcaaggaatggtgctggccacgtggggaagaaagagcgggcatgccttcccacctcaaattaacggatcacagagtcatgctgagagaccagttcctgaatgattgtagatcttgttaaactgacaaaacccagtgcagctccaacccttattagcttggtacccaaatacattgctctgaagtcacaa

SEQ ID NO: 721 - DNA, 414 bp, Homo sapiens
  misc_feature (1)...(414): n = A,T,C or G
gactgagatacctggagtctcctacctgacgaattttctttcgatggcattaccagagtataggctcaantttaaagaagcttttacacactggaaattctattaagataagatgtgaaggaatcagactatttcttttgtggcttnaagcacttcagacaaactgtgcagaagagcaggtgctgattttcgcttgcctagtgcctggtttcccagcggtcttgtcatccaggggtccctgcacactggagacactcatcaaccctagccctagtatagttgatgcaaaaatatacccagaggaaatcaccccacttntgccagccatatcaggggagaagattgctgaggaccaaacctgcttttttcttnaaatactgntgaantacatggttattcaggctgcaagcttgc

SEQ ID NO: 722 - DNA, 559 bp, Homo sapiens
  misc_feature (1)...(559): n = A,T,C or G
gactgaggctcggccatcttgatnttcttctcgttgccgtgcgntagacgtcttctgctcgatgctgctgatgaccctncaggaggagcgnggagccctcaccacagttcttgtaggccaccgacaggaggttccgttcctcattggacagtggttcgttcagcntcggtcacctggaggaggaaggacccgagcaccgttacagacaggtgatgacaatggggtgaagctatctttacatcaacccacaacaggtccatgcaccatggagaccgttagcaggcagaaacactgcactctggctgggaggaaggggagtgagtgacaggagcagcacaggtggcttctacagtctcaagcaccagtgtnctccacggaagaaccgtcagcctgtcctaaggacaaatcaaatcctctcccgtggcatggacacttagcactctcagcatgagatggccatgttctcaggaagagagcaggcatcctcaagctgaccagtgctcttacttgagtcatggtccctctgggaaagaatgagtcaccctctctcagtatgcct

SEQ ID NO: 723 - DNA, 106 bp, Homo sapiens
  misc_feature (1)...(106): n = A,T,C or G
gactgagatcgagttccgngatgaagctgaactttctcctcggnccggggcagcagggcggnagttgacccaagacgagaagcttcagcttcgaaaagaaaagaaa

SEQ ID NO: 724 - DNA, 544 bp, Homo sapiens
  misc_feature (1)...(544): n = A,T,C or G
tgaggtgctggaaagcaacacttctgaactacattttgacagaacaacataatagaaaaatagcagtgattttaaatgaatttggagaagggagtgcagtagagaaatccttagctgtcagtcaaggtggagaactctatgaagaatggctggaacttagaaatggttgcctctgctgttcagtcaaggacagtggccttagagctatagagaatctgatgcaaaagaagggcaagtttgactacatactcttagagaccactgggctagcagatcctggtgcagtggcttctatgttttgggttgatgctgagttagggagtgatatttatcttgatggtatcataactgttgtagattcaaaatatggattaaaacatttaactgaanaaaaacctgatggccttgtcaatgaagctactaggcaagttgcattggcagacatgattctcatcaataaaacagacttggtttcagaagaggagctaaacaacttaagaacaactatcagatcaataaatggactgggaaaagttttagaaaa

SEQ ID NO: 725 - DNA, 202 bp, Homo sapiens
  misc_feature (1)...(202): n = A,T,C or G
agcccaaggaactggaaaagaatgaaggncattcctaaaagggccccntncgacgtgggggatgacatgtccaacaaagtatccatgtccagcactgcccagggcagcaacatctttgagagaactgaggtcttggcagctctgatcgtgggcggcgtggtaggcatnctctttgccgttttcctgatcctgctgctggtgt

SEQ ID NO: 726 - DNA, 134 bp, Homo sapiens
  misc_feature (1)...(134): n = A,T,C or G
cctccatttagacttcacctaactcctgacantaatggnntnattngctnagnangaccagaaaaggagagggcccaccagacgccngcccanagccttncagacccttccacagtcngggctgtgctgaaagg

SEQ ID NO: 727 - DNA, 496 bp, Homo sapiens
  misc_feature (1)...(496): n = A,T,C or G
gactgagccgagcccgatcctggtgcgtctggncaccggnggccaggagggactgcagtaccagncaggggnccacataggtgtgtgcccacccaaccgtcctggcctagtggaggcactgctgagccgagtggaggaccctccgccatccacagaacctgtgaaatgannaacaantggagaaaggcagccctggtggccctccccccggntgggtacgggacccccggntacccccatgtacgctgnggnaggctctcacctacttcctggacatcacttccccgcctagtcctcgcctccttcgactgctcancaccctggcagaagagtccagcgaacagcaggagctagaggctctcagccaggacccccggngctacgaanagtggaagtggntcannatgccccacactgctagaggtgctggagcaatttcctttagtgntnctgcctgccccgcctgatcctcacccagctgcccttgctccagccc

SEQ ID NO: 728 - DNA, 489 bp, Homo sapiens
  misc_feature (1)...(489): n = A,T,C or G
actgagctatcttcgacttncacgtncacccccaggccgngacgggtgaggagggtggtgtggcccgtttccagtgccaaatccatgggcttcccaagcccctgatcacatgggagaagaacagagttcccattgacacaggacgatgagaggnacacacctactgcccaagggagtcctgcanataacaggacttnggnctgaggacagcggcatcttacactgtgtggcctcaaacattgctagtgtgcgggtcagccacggggccaggctcactgtgtcaggctcgggctcagggacctacaaggagcccaccattcttgtggggcctgagaacctcaccctgacagtgcaccagactgcggtgctggagtgtgtcgccacggncaacccgcgccccattgtgtcctgnngccgcttggatggccgccccattggggtggagggcatccaggtgctnggcacaggaaaccctatcatctcagatgt

SEQ ID NO: 729 - DNA, 282 bp, Homo sapiens
  misc_feature (1)...(282): n = A,T,C or G
ggtggcatgtcacatctganagaggctccatgtgtaagacctgtgccaaccagcgccagccacgatttaagccatgaggatgagcctcctgccgcttcccatatggccactggagctggatgatggcggcatacagacagatcatcccagacatgcattttagaaagttatcctgttgctcaaccttggaatgcgtcacttggtagccaagcttccgntgatagtcctccaaagccatcctttccttgaaagctgggtagaaaggacggagtatggacactt

SEQ ID NO: 730 - DNA, 235 bp, Homo sapiens
  misc_feature (1)...(235): n = A,T,C or G
actgagacttagcctgacagattcagatgggccccggagtggtggttccttccttcgctaggaactgatgtcccagaaccttcaggagacaagccaggcctacccccgacatcgacctggtagccacngcaggccctaaaagtctcaaagttaccccacgagcaaccatgtacacgtttcctgcctgacacaaagcaggtgctcaataaaagagagctattgaagtaaaaaaaaa

SEQ ID NO: 731 - DNA, 263 bp, Homo sapiens
  misc_feature (1)...(263): n = A,T,C or G
gctgcttcatgaaatgcaacttnnanacccaacagcctctttgatagcaaaagtggctacagcccangatgacataactggcgatggcacctacntccaangatcttatcntnngtgagcctnatcanncaggcngtnccntgtgcatttangnaggncttcacccnctgaataatanctgaaggttttgaagcggcaaaggantnggcactccaatttctggaacaagtcaaagtangcaaagagatggacagagaaacatt

SEQ ID NO: 732 - DNA, 110 bp, Homo sapiens
accctgaaagatgagaccggagctatcttcatcgaccgggaccccaccgtctttgcccccatccttaatttcctgcggccaataaaacctgtcactgccaaaaaaaaaaa

SEQ ID NO: 733 - DNA, 457 bp, Homo sapiens
  misc_feature (1)...(457): n = A,T,C or G
gactgaggctcaaatctgatttccttctggggtagnggncgngcacgtaganntngnngaaagatcttgcgaggaggatcaanntgctngaatatgcttnnnagcaggaaagagccaaataccacaagttgaaatatgggacagaactgaatcagggagacatgaagcctccaagctatgactccgatgaaggtaatgaaacagaggtgcagccacagcaaaatagccagttaatgtggaaacaaggccggcagctactcaggcantgtcttactncggactggtatgnatncccntncacactncgntacangcctttgcagcacaccanngtaactctctggattcccatgattntgcacagngtggactaacatactgggactctataggggttnngatgncaggnngcagactanncctggagtcttggngncttgcatacagatttatgccg

SEQ ID NO: 734 - DNA, 329 bp, Homo sapiens
  misc_feature (1)...(329): n = A,T,C or G
gactgagacatacatactaggcgaccncaggcagccgccctctgacantncatggacccaagactnctgcagctgcccctgagaagcagccagaagacatcaaaggccggattcccaagggtcttccaaagccttacaacagactacagagttgaagtgctggaagacggagtgttacccctaatcttattacaccccccccagactaatccccaagctgggagtcctaccacccgggtcctccctcccacaactntgtcttaccgaccctataaatcgtaataaatatctgtgttacagcagggaggcatatctcgcaccccgtggat

SEQ ID NO: 735 - DNA, 464 bp, Homo sapiens
  misc_feature (1)...(464): n = A,T,C or G
ttactgcgtctggtgncagcatggcctacggcctgttgcgcgccttannaggntcaccagaagccctcannngtgccctcttctgcctcctcntgcncannccatccgnggatccgccagccancatggttggcttttgattggggagaacttccgcttnctgtntntnttgttcaagagcaaggatgtgatgattttcaatgggctggnggccctgggcacggngggcagtcaggagctgttctcagtggtggccttccactgtccctgctcacccgcccggaactacctgtatggactgacagcaattggcgtgcctgcgctggccctcttccttatcggagtcattntcaacaaccacacttggaacctagttcgncgagtgccagtaccggagggccaagaactgctccngcggcccccgaaccttcctcctcctaagctcaatcctgggcccgtgccag

SEQ ID NO: 736 - DNA, 132 bp, Homo sapiens
tctgagctataaagacttgaagttgcccttccagtctaaagatggaaaacagtaccaccaccatttctcgggaggagcttgaagagctacaagaagcgtttaataaaataggtaaggttaaggaaaaaaaaa

SEQ ID NO: 737 - DNA, 259 bp, Homo sapiens
  misc_feature (1)...(259): n = A,T,C or G
actgagcccattgctatggacagtgccatcactctgtggcagttccttctccagctcctgcaggagcctcagaatgagcacatgatctgctggacatctaacnatggggagttcaagcttctgcaggctggaggaggtggctcgtctttgggggattcgcaagaacaagcctaatatgaattatgataaactcagccgagccctgcgatactactacgtaaagaacatcattaaaaaagtgaatggtcaaaaaaaaaaa

SEQ ID NO: 738 - DNA, 519 bp, Homo sapiens
gaactgagatgtatctggatattatgcatgcacttaaaaatgccagcacggataactcagtcataactgttttcacaggaactggtgactactacagcagtgggaatgacctaaaaaacttgattaatgacgctggtgaaatacaggacgtagtagccacgtctactaagatactgagggaatttgtaaactgttttatagactttccgaagcctctggttgcagtagtaaatggcccagctgtgggaatcgctgtcaccatcctggcactatttgatgctgtctttgcttcggacagggcaacgtttcatactccattcagccaactcagccagatcccggaagcatgctccacatacatgtttccaaagataatgggcccaacaaaggcagctgagatgcttctctttgggaagaagctcacagcaagagaggcctgggctcaaggccttgtcactgaagttttccctgagagcacttttgagacagaagtctggaccaggctgaaaacatattcgc

SEQ ID NO: 739 - DNA, 397 bp, Homo sapiens
  misc_feature (1)...(397): n = A,T,C or G
aggattcttcacagcggatgagtgtgnggtcatgcnncagangntcggcgagattgtatctgtnatggatgtccctctgcactgccggacagaattttccacccaggaagatgagcaacttcaaacccagggcaagacagactacttcttgagcagcggngacaagatccgattcttctttgaaaaaggcgtttttgatgagaaaggaaatttcttggtccctcctgagaaatctatcaacaaaattggccatgctctgcatgcccatgaccctgtcttcaggagcatcacacattctcccaaggtgcaggctttngttngaagtntggncctncanatgccagtggtggngcagagcatgtatatgtttaagcaacctcactttggcggcgaagag

SEQ ID NO: 740 - DNA, 237 bp, Homo sapiens
gactgagccacaaatgcagcccacggccaccatggccacagcggccgccactaccgccactgttgccctgacgacttcgtgggacaatgccaccagccgccccacggcggagcctgaccccatcttggacaactatgtgctgctggtggtggtgatgtcgctgttcgttggaggcacagctggtggtgctgtctggcgttcttctgctctgcaaacgctgctgggaggtgcaccaga

SEQ ID NO: 741 - DNA, 310 bp, Homo sapiens
  misc_feature (1)...(310): n = A,T,C or G
gactgagcccttcaagctcctaggtattttagatgttgagaacactccatgtgctcgagaatctatactctatggctcattaggatctattgtgactggacttggacatttcttggtgaccagtagaattagaagatcatgtgatgttggagtaggaggatttatcctggtgactttaggatgcntggttccacntgtaggtataatttcgctaagcagaggatccaggaaagaattgccagagaaggaataaaaaataagatnttatatgaaagcacccaccttgatcctgaaagaaaaatgaagacca

SEQ ID NO: 742 - DNA, 362 bp, Homo sapiens
  misc_feature (1)...(362): n = A,T,C or G
gactgagagggggctnggacatttgcttcatangaaanagaccacaattcttacggtcatcctgatctnaacgaaggantcttccgaggagccgccggagttgagtttgagctgcagttctgagacgatgcccagcaggtctgccttttcagcccgaaggcgcatcacctggatcttcagatgcctccacttcctgctccacctgggtcttcagcttctccacttcctcctccaaggctctgggatacctgtagccacctgtgaggtcctgggaagaccaggaatgaggcatgaggcgaatacaaaaatcaaacggaaggtctggctagtaaacttgatggccaagcatcacaaaaaaaaaa

SEQ ID NO: 743 - DNA, 138 bp, Homo sapiens
  misc_feature (1)...(138): n = A,T,C or G
tgaagaacttccaggacatnatgcgaaagcanaggccagaaagagtgtctcatcttcttcaggataacttgccaaagtctgtttctacttttcaatatgatcatttctttgagaagaaaattgatgagaaaaaaaaaa

SEQ ID NO: 744 - DNA, 510 bp, Homo sapiens
  misc_feature (1)...(510): n = A,T,C or G
gactgagatacacttttggcgtcatggntcggtttggagntatctcagaaggtgaagtagaccactctttctttgacagtgattttgaagatgcaaagaaatgtgaaagtaattccatttttgacaagcaaaatgatgatgaccttaaggaaggaataaataaggacaccaaaaatgtaaacttgaaanntggagtacaaaaatgatcatcttaaggnganaatagatcctaacacagaaaatgtgaacttgaaacttgggctacaaacaacagaaaattaccttactcagaaaggaaatgaaaggaaagcaaacttttcttcaaaggaacaacatatagaaaatgatcctacacaagcacgaagttcctcagtgttgacttcttcacgatcaaaaaaatngtgtgatgccacaaaaggacataaattaaacttgcccgttccagatagaattcctaagattgtgaaaggtgagggcnattactacacggatggggaggaaagcagcgac

SEQ ID NO: 745 - DNA, 227 bp, Homo sapiens
  misc_feature (1)...(227): n = A,T,C or G
gactgaggtggggtctttaaaagcctgcccgccgggtacgagccctgccatccttgttctaaggagcctcccccagggcttggccgtgggcccctcgagatccaggaatcagcacttgggggtctggtgtgtaggagcacccctgcagcccggcctgcattggggacctctggaagatgagtccgtcctggagaagggcngagggaatgaagacaccaaaaaaaaaa

SEQ ID NO: 746 - DNA, 491 bp, Homo sapiens
  misc_feature (1)...(491): n = A,T,C or G
cgtgtgggcaaaagggctaccaggaaacggactctgtggtcagctcggtgacaaccaaagccaaaggtgtggctgtgaccaacacttctcagcttggattccggatctgggacgtggncgactatgtggtcccagctcaggaggaaaactccctcttcatcatgaccaacatgatctgtcaccgtgaaccagacgcanggtacctgtncagagattcctgatnagaccagcatttgcgattcagacgccaactgcactctcggctcctcggacacccacagcagtggaattgggactggaaggtgtgttccattcaacgcgtctgtgaagacctgtgaggtggccgcatggtgcccagtggagaatgacgctggtgtgccaacgccagcttttttaaaggctgcagaaaacttcaccctcttggtaaagaacaacatctggtaccccaagnttaatttcagcaagtaagngggggccgggcaataggcatt

SEQ ID NO: 747 - DNA, 431 bp, Homo sapiens; identical to SEQ ID NO: 29
  misc_feature (1)...(431): n = A,T,C or G

SEQ ID NO: 748 - DNA, 520 bp, Homo sapiens
tgaggtattagaaatggctactccacagtcagttttcgtctttgcaatctgcattttaatgataacagaattaatcctggcctccaaaagctactatgatatcttaggtgtgccaaagtctgcctcagagcgacaaatcaaaaaggcctttcacaaattagccatgaagtaccaccctgacaaaaataaaagccctgatgctgaagcaaaattcagagagattgcagaagcgtatgaaacactctcggatgccaatagtcggaaagagtatgacacaattggacacagtgcttttaccaatggcaaaggacaaagaggcaatgggagtccttttgaacagtcatttaacttcaattttgatgacttatttaaagactttaatttttttggtcagaaccaaaacactcggtctaagaagcattttgaaaaccacttccacacacgccaggatggttctagtagacaaaggcatcacttccaggagttttcttttggaggcggattgtttgatgatccccaa

SEQ ID NO: 749 - DNA, 324 bp, Homo sapiens
  misc_feature (1)...(324): n = A,T,C or G
tgtggtaggacacacatgggacacccaggntcatncccgnaccagatgatncgagaacagagtcagggagtccctactcctgctgcagnagccaccaccagcctgncaaggcaccccancactcacctgtggagaaccctnggccccgnnttcgtcccccacggaaaaagccccggcctccagcagagccaccccggtatcctcgggaccggttgtcagaagacttgccagcctggtcaactctgatctgccgcccgtccacagactgcaggagaaagttagggtcactgtacccgattccacaccagacctatccaaggtgac

SEQ ID NO: 750 - DNA, 102 bp, Homo sapiens
  misc_feature (1)...(102): n = A,T,C or G
atctaccagctgaaggngctccactgtgccatgnatgcctgnatnaacctggggatgctggaggaggcgttgatctncgccatgcgcaccatggagccgtac

SEQ ID NO: 751 - DNA, 477 bp, Homo sapiens
  misc_feature (1)...(477): n = A,T,C or G
tctgggccgaggccataattacttcggtgaggaacatntcancggantggnccagnaagcatgggtgantnccatatactntncatncaccgatctntaccagngtctcgagtccaccagctcaggtcgcaggcatgagcttcttgaggctctcgtagcccaccacgatgacngatggtggagggtgtagccgagatgattcttgccgagaggcccttcatgaggccccaaggcccctcctctgccatcagctgcctgaaggtcaggacgatggagctcttgccttcaacctgaaaaagtcaccacagtgaagagccaccaactgtgctgtcaccactgctcagcacaccctcaatagcacttcaggctcgaggagggactccgagggctagcctntgntttctgggcagcacagtgacttcctnctagctctggngacagacttcctggnnggactnaaccctgcctacccccagg

SEQ ID NO: 752 - DNA, 437 bp, Homo sapiens
  misc_feature (1)...(437): n = A,T,C or G
ggagcatgtacggcggangtggagagctatnaagaaagcagtgccagcaaagtcatctctcctcactgtntctgaggggcaggatggaggagcgtccaggaggaatcancnncggnttcagnttctanaagcacgagcagnaggcctctgttcacgccatgatgaaggagaaccaggaacataatgaagaaagttcctagaacttggatgagaaattacaanactgttcaaaggaaaangaggagtctaagaancanggctcanagcacctccggaggcnctgaggaatntngggctcagcgttcatgattgcttgagnctanacangangcatgaagaggcatcggntgaagattnaattttnaagcttanagagctgtacaaggagcccacattcctgaaaggacagctcgctactnttgaagagactgtaactg

SEQ ID NO: 753 - DNA, 512 bp, Homo sapiens
  misc_feature (1)...(512): n = A,T,C or G
agccttttgccgcttgtctgagcagtacagaaatcagngccccgactgctcatcaatcgagacttggtggggccgttcgttctgagtcctcgaaggaaagatgtggtccagctaggggatgtagttcatggtgtggaaaggctggtggacctcctggggtggacacangaactgcatggatcttatgcagcggggaaccgtggcangcatggatggacaggacagataagactatggcttcttcacctggggaagtcacacagcagatcatcctatgtccagcaagacttcatgcctgaagacagctccaacacgtttacaaacatgaaccagaccacaacatgtggcctggacagnggtcctccgaggctgcctttggaaaggctgaccagggatgtctacccttggggcccctccatgtgtgcgccctgtccacctcatcactgctgaaggtgtagtgcaggtgctgctttctgcagcggcccttaagttatcacgagggcagcacagac

SEQ ID NO: 754 - DNA, 462 bp, Homo sapiens; identical to SEQ ID NO: 30
  misc_feature (1)...(462): n = A,T,C or G

SEQ ID NO: 755 - DNA, 500 bp, Homo sapiens
  misc_feature (1)...(500): n = A,T,C or G
gactgagtaagctcaacccagggncacctctgccctctgctctccacgcatgcgcctctggagaagaagtcttggcccagtacttacagcagcagcatcctagagtcttgagttcgtcacatctgctgctgactccctgcaaagtggctcctccatacccacacttcttctcaagcttcagtcagaaagggctggccatggacagtacccccaagggcgcagcagtacagagcatccctgtgtttggggccttgcgttcaacttcatccttgcaccgtacgctgggagacttggctgaagagctcagcagacttgacctgcggcgctgggctagcttcatggacgctggcgtggagcaggatgacatggaagagatgctgcacgagttacacaggttggcccagtgttaccaggagggtgacagtctctcgaactgaagtccaggggagggtagtgggaagaagaatttataataaaagctgccgtgcaggaaaaaaaaa

SEQ ID NO: 756 - DNA, 226 bp, Homo sapiens
gactgaggaaaccattgaagatgttgaagagatgctcaacaatctccctggtgtgacgtccgttcacagtcgtttctatgatctctccaggcctaggtgatgagaaagggcacggaatgggaatggggacagggtagtctccacccagctccacctgagtggactttgtccagtgtggtctgagtgcttgctctaataaatgccttggcattgttaaaaaaaaaaa

SEQ ID NO: 757 - DNA, 353 bp, Homo sapiens
  misc_feature (1)...(353): n = A,T,C or G
caacaccgaggcttgagcagttcagngtggtgcctgccacagcggattnttccatcctgatagaaatagatgaggtcgaccagtagttcattacacgtgaagcagacaaagcaggacgggtgccagcatactccaggtcccgcacgggaggcgancacggacacctcccctncattcatctgcagctccacactgaaaacaaagacttgaagttaacaaacggtccttcacctaaattactgggttttcagcatttcccacttganaataacctatggntgngnnagggcagctttaatttcngtctactcctgcnggngacngaatggctatcccaccttcaatacaccctg

SEQ ID NO: 758 - DNA, 552 bp, Homo sapiens
  misc_feature (1)...(552): n = A,T,C or G
actgaggccctgctgtccgtccttcgagnaaagccaccgttcaagaacagtctttaggaaagtgggagggtttgtgtacattacatccttgctcgttgctatggagaggtctttgagctctcctcccaagaacggctgggagaaggtgagccagagccaggtgttggagctcctgcacactgtgttctgcacgctgacggcagccttgcgctatgagccggccaactcgcacttcttcaagaccgagatacagtacgaaaagctggcggacgctgtccgcttccttggctgcttctcagacctcaggaaaataagtgccgtgaacgtcttcccgtcaaacacgcagcctttccagagactgctggaggaaggggcggtgtccgtggactctgtgtcaccgaccctgcggcactgcagtaaactctttatctatctctacaaagtggccacagattcttttgacagccatgcagagcagatccctccttgcctgacaagcgagtcctctctcccctctccctggggaacaccagctctgtccaggaaaagttc

SEQ ID NO: 759 - DNA, 554 bp, Homo sapiens
  misc_feature (1)...(554): n = A,T,C or G
tgaggcatcctcgtgtcagggcacacagcaatcattgagtcctgccaggaagccttcatcctgcgcctcttccgccagaaaaacaagcgcgggttcatcaaagctttcaccgacaacngctgttgcctttgacactggcttttgtcacgtggaaagagtgatgccggaacctttttgtgaggaagctctacctgtggccaaggttccatgtagcagtcaactcattcttggaacaacacaagcctgaagttgtagagattcacgtgtccatgactcccgccatgcttgccattcagacggccatactagacatcttaaatgcatgtctgaaagaactgaaatgtcacaacccgtcacttgaagtagaagatttgtcactagaaaacgctcttgggaagccattcgacaaggtccacttcttttctttctcttaccccatagctggttacgttgttgttttaaagagtggaaggcatttcaatattcaccatgttctttgtaggaattaaactgtaggtgacttaaagtggggctgctttgcccactgggaaata

SEQ ID NO: 760 - DNA, 393 bp, Homo sapiens
  misc_feature (1)...(393): n = A,T,C or G
cattctgtctctctggncatagcaagccctaatgctatagacttggcagtggctgctgatgtggaacactgtgaatgtccccaaggctacactggggacctcctgtgaggcctgcctccctggctattatcgagtggactgggatacntctttggaggaatctgtcagccctgcgagtgccacgggcatgcatccgagtgtgacattcatggaatttgctctgtgtgtacacacaacaccacgggggatcactgtgagcagtgcctgcctggcttctatgggacaccttcacgtgggaccccaggagactgccagccttgtgcctgccctctctccattgactctaacaatttcagccctacctgccacctcactgatggagaggaagtggtt

SEQ ID NO: 761 - DNA, 213 bp, Homo sapiens
  misc_feature (1)...(213): n = A,T,C or G
gcatctgctcccaagtgttgcttccagaagaaganannattatagtcgaagaaaccaagagcantgggcacgacagtgatagaggaaaagagcctcgtggatacggtgtatgccgttaaaggatgaagtccangagttaagacaggataacacgaagatgaacaagtccttagaggaggaacagagggcccgcaaggacttagagaagctgga

SEQ ID NO: 762 - DNA, 164 bp, Homo sapiens
  misc_feature (1)...(164): n = A,T,C or G
gatgctgagtctgacttggtggatggccggcactccccaccaatggtcaggagtgtagctgccatccatcccagcctggagatcccgatgctgattcctaaagagaagcccccaatcacagttgttggtgatgttgnaggaagaatcgacatcattgtcgatca

SEQ ID NO: 763 - DNA, 139 bp, Homo sapiens
  misc_feature (1)...(139): n = A,T,C or G
catacttctcatttaaactactcaagaaagaaggccccgttgcnaatgnacagaactctnccattcctgnaaaacttcctganccagngaaagccagngaagcagcatgtggaaaaagacccagccaaaggctcaggta

SEQ ID NO: 764 - DNA, 461 bp, Homo sapiens
gactgagcgagtctccagttaataagtcacatcgaacaatttttggataccaatgaaacactgtattttatgaaaagtatggactgcatcaaagctttccgggaggaggccattcagttttcagaagaacagcgcttcaacagcttcctggaagcccttcgagagaaagtggaaattaagcaattaaatcatttctgggaaattgttgttcaggatggagttactctgatcaccaaagacgaaggcccaggaagctctatcacagctgaggaagccacaaagtttctggcccccaaagacaaagcaaaagaagatacaacgggacctgaagaagctggtgatggtggatgatttactggacatgatatagatcatggatgtgtggggaatccaagagtgccagctctgtgctgctgagagctctggcagcatccctgaggccgtgcaggggatgtgaagct

SEQ ID NO: 765 - DNA, 303 bp, Homo sapiens
  misc_feature (1)...(303): n = A,T,C or G
tgagggggttccatcgttaagccaatcgtttatggcaatgttgccaggtactttggaaagaagagagaagaagacggncacactcaccagtggactgtgtaccgtgaagccctacagaaacgaggtgggcatcgcattttcccggaaggagtgtttgcggtgcagnctgtttagttgacagtaaactngaaattgtgtatagtaacgtttccaagtatgaggtgggtccattatagactcccaccactagccccatcagaaacaataaaatgaagcccctcatcttcatgtaaataaaaaaaa

SEQ ID NO: 766 - DNA, 466 bp, Homo sapiens; identical to SEQ ID NO: 31
  misc_feature (1)...(466): n = A,T,C or G

SEQ ID NO: 767 - DNA, 246 bp, Homo sapiens
gtttgagatgaggtttgccaagatgcccgatgagcccatggaggcgcctgcgctgcccgctcccacggcccccatcgtgagcaagggggctgagagcagccgcagtagtgaggagagctcttcagattcaggcagctcagactcagaagaggagcgagccactcggctggctgagctgcaggagcagctgaaggccgtgcacgaacagctggctgccttgtctcaggccccagtgaacaaaccaaa

SEQ ID NO: 768 - DNA, 299 bp, Homo sapiens
  misc_feature (1)...(299): n = A,T,C or G
attgagcgttggtgagaagataaagtcagctctgaagaaagctgtgggaggtgttgccttatccctctcgactggcctctctgtgggtgtattcttcctgcagtttcttgactggtggtactcttctgagaaccaagaagccatcaaatcactgactgccctgcccactccaccaccacctgtacacctagactacaactctgattctcccctcttacccaaaatgaaaacagtgtgcccactctgtcgtaaaantngagtgaatgatactggtgtcttgccacctctggctatgtatt

SEQ ID NO: 769 - DNA, 275 bp, Homo sapiens
  misc_feature (1)...(275): n = A,T,C or G
tgagtggagcagccggcacctgnggncatcactcgcgctaggggcctntgncccngngnntgcagnaggngatgtttgccagngacacggactgtggttccatgtggatggctgactctgtggcctggaaccctcacaagcttctcgccgcagggctgcagtgctccgctcttcttctccgggacacctcgaacctgctcaagcgctgccatggatcccaggccagctacctcttccagcaagacaagttctacngatgtggctctggacaccag

SEQ ID NO: 770 - DNA, 215 bp, Homo sapiens
tgagatggtgaagaaagctcagactatgatgaagaaagctcagaagaagatgaatcgcttggggaagaaaggggaagctgataggcatgtgtttgatatgaagcccaagcacttgctgtctgggaagaggaaagctggtaaaaaggacaggagataatgtcctcttcagttggaacagtttaagtagactcttggttattttgggtgtggtatgg

SEQ ID NO: 771 - DNA, 283 bp, Homo sapiens
  misc_feature (1)...(283): n = A,T,C or G
actgaggtgcacaaggcaaatccaatacggnaagtacgcagcagtggaggtgaaatctagcgagctgcctctgactgtgccggtgtctcctaagttctccactcggttccagtagaagctgcatctatatcacaagcatggagcacgcggtcttcagactcacccgccatgtgtggaaacacacctgataactaatggatgccgggtgttttgaagatgactctacacagcaactntgaagctaatgagcctncactcatttagactttaaccagacttcttg

SEQ ID NO: 772 - DNA, 361 bp, Homo sapiens
  misc_feature (1)...(361): n = A,T,C or G
tttgccaatgcaggaggagccccgaacatcgagactgcacctctgttcctgaaccctcagaacctctctctgctcaccagcaacccagaangcttgntntntgncgntgcnncctnnacagggaactnatgcacntacaggcagccttnatgcctnctccacctcaactgagtccatncagagctctctgttcacagtcgcctntgccagtgggcctgnttccaccaccacagctgcctccaaggcacagtgagctgagtgcagagctgggttgncacaggctttcctcactacagggtgataggctggctaccagctgcttaagaaaatgacacctgtcattggccttcctcccaccatg

SEQ ID NO: 773 - DNA, 210 bp, Homo sapiens
cgtgtgagacatgaacttctcttggcgaaatgaatgcaaccagtgtaaggcacctaagccagatggcccaggagggggaccaggaggctctcatatggggggaaactatggagatgatcgacgtggcagaggaggatatgaccggggcggctaccggggccgaggaggggaccgtgggggcttcagagggggccggggtggtggggacag

SEQ ID NO: 774 - DNA, 315 bp, Homo sapiens
gactgagacagaagaaaaaggaaaaacacaacaagacgcagttcttcgagcagcctccaagagagaatcagagtcacaggaaaacgcctcaagcagccgccggtaccatggcagttcacacacctcccagtgtccttgtgcctctgcttcaggcgcagccagacgcgccctgggcatccgccgtctctaccatagggatgctggtgctccgtgcatccgtgtacacgtgcaaggttttgctctgcttgggtggacagcagcccctgtaccactgaactcattttgtaacagcaatttcgcttgcaaaaaaaaaaa

SEQ ID NO: 775 - DNA, 213 bp, Homo sapiens
  misc_feature (1)...(213): n = A,T,C or G
ctgggagcaggactatcatgtttgagatcaaccgcctggatctaggcctgaccgtggaggtgtggaacaagggtctcatctggnacacgatggtgggtactgtgtggatcccgctgcggactatccgccagtccaatgaggagggcccaggagagtggctcncactgnactctnancccatcntggcagacagtgagatctgcgggaccaagg

SEQ ID NO: 776 - DNA, 248 bp, Homo sapiens
  misc_feature (1)...(248): n = A,T,C or G
accctgagatgctcaagtaccagcggcgacagcaacagcagcagcctggatcagaagaangccactactagggagacaagctcancatcctcagncacggcntgnggtcaatgggnaangtctagangatatcanaaagaatcttttgangaaacaagnggaaactcggacagcanatggccgnagganaatcacgcctctttgcatagcacannctggacactgggnactcactccttcaccaagct

SEQ ID NO: 777 - DNA, 366 bp, Homo sapiens
tgaggtttccttaggaaacaaagaaagaagcaaaggcgtgttctacaaggccctccagagctgtccttgggcaaaggtgctatacatggacgccatggagtatttcccagacgagctgcaggagatcctggacgtgatgaccgagaaggagctccgtgtgcgcctgccccttgaggagctggagctgctgctggaggattagtgtgcagccaggcctgggccagcctgcagagcccaaagccgcagctgtgcaggctccactgtcctgctggggttggacgtattgacttacatattatatatgtgatctctatgtacaagtggagtcgtgccagtgataaaccttttgtggttgaaaaaaaaaaa

SEQ ID NO: 778 - DNA, 500 bp, Homo sapiens
  misc_feature (1)...(500): n = A,T,C or G
gttttgagagaatgacagcttgaggcatcagncgtgtggtggtggaatacctgcgggctgtcatgcagaagcgtatttcctttcggagtgctgaagagcgcaaggagggcgccgagaagatggtcagagaggctgaacagctccgcttcctgttccggaagctggcgtctggatttggtgaggatgcagatggacacctgtgatacaattgttgcagtggcagaggtcattaagctcacagacccttctctgctctatctagaagtctcaactctggtcagcaaatatccagacancagagatgaccacattggtgcactgctggcactgcgaggagatgccagccgggacatgaaacagaccatcatggagacgctggagcagggccccatgcaagcaagccccaactatgtacccatcttcaaggagattgttgtgcccagtctgaacgtggcaaagctccttaagtagccctgtcctcnctgctgccctatgtgcct

SEQ ID NO: 779 - DNA, 258 bp, Homo sapiens
  misc_feature (1)...(258): n = A,T,C or G
ggcatcaccatatccaccaccaaagcgccggnntntnccactctccacctcttaaacanngcaagcctncacagtcaccaagagacgcttcgccctccttatcttcanaacataggaaagggtcttccccaggccgatccacccggnaggccccgttcaccacaaccaaacaaacggnattcgncctnaccacgnccancgggctnntcagacctnaagccctncncntgtacgaagaggagcttcagcgccaccccc

SEQ ID NO: 780 - DNA, 521 bp, Homo sapiens; identical to SEQ ID NO: 32

SEQ ID NO: 781 - DNA, 525 bp, Homo sapiens
  misc_feature (1)...(525): n = A,T,C or G
catgaacgaaccgctggnggactgtgagggctatccccggncggatgnggacttgtaccaggtccgaacagcaaggcacaacatcatctgtctccagaatgatcacaaggcactgatgaagcaagtggaggaggccctgcaccagctgcacgctcgggacaaagagaagcaggctcgggacatggcgtgaagcccgagaagaggccatgaaccgcaggctggcctccaacagccccgccctgccccaggcctttgccagagngaacagtatcagccccggttccccagccagnattgcggncctgcaagtggatgactaaattgtggagttcggagtccgtgaacacccaaaacttccagtcagngcagaacgtgggcactgcgnngcagcataccngagnggaagcccctgaatgngacgntganccgcactaggagagaagcaccagctnagactgattccaaccngctgngcaangaaaaggactgctgatctgcacattattcctctccagagatgactgt

SEQ ID NO: 782 - DNA, 256 bp, Homo sapiens
  misc_feature (1)...(256): n = A,T,C or G
acgtgtgaagggtctgnangcctagggaagttaccaatgttcaaaatgctctgtaaccgtgtatcaatattattgcccatcattttggccttttcctctgaacacccagctgtgaagatgtttttggaatagtgtgtgcatgccagagttggtgcatgacactttctttgtgaaccgggatgtcagtttggagaaagncttctgcagtcccgaggattngcttncatttccagaaggcaggtcagcctgattccca

SEQ ID NO: 783 - DNA, 540 bp, Homo sapiens
  misc_feature (1)...(540): n = A,T,C or G
gactgaggtggggtctttccgtggncgcacttctggatcaggtggagcgcttccgtgagcagctgcgacgacaggaggaaggcgcttnggagacccagctgcggcaggaagttgaaagacttacaggagcggtctagaggaaaaacgagaggagagatgnttnagcctgatgatncactctcancntgagcaaagagaangaggtagtcttgcattcgtggaagtgtgnccgagaaggatananccagggccgccagtgatgttctgtgccnatccttggctgatgagacccaccaacctgcgcaggacattggcagccactgcccacatgtgccaacatctggccaaatgtctggatgaacgacagtgtgcacagggagacgctggggagaaaagccctgctgagctagagcaaacaagcagcgatgcttctggccagagtgttattaagaagttacaggaagaaaatcgnctgttaaaacagaaggtgactcatgtanaagaccctcaatgctaagtggcagcgttatgatgcaagta

SEQ ID NO: 784 - DNA, 114 bp, Homo sapiens
  misc_feature (1)...(114): n = A,T,C or G
gactgaggataacaaccttcaggnaccagtnnaagaaggtgcttaccttggcgcctcatctcctgccggacagcctctagacctccctggtcctcaataaaatcgtagatgagc

SEQ ID NO: 785 - DNA, 517 bp, Homo sapiens
  misc_feature (1)...(517): n = A,T,C or G
tgaggaagaaaaattatcactgactagntcactagatgatgttaccaggcaactgcacattacacaagagacgttgtcggaaaaaatgcaagaattagataagctgcggagtgaatgggcctcgcacacagcatcgctgacgaataagcacctctcaggagttaacagctgagaaggagaaggccttgcagacccaagttcagtgccaacagcagcacgagcaacagaaaaaggaactggaaaccctccatcaacggaatatccaccagctacaaagcagattgtccgagttagaggcagctaataaagagctcaccgagaggaagtataaaggagactcgactgtccgagagctaaaggcgaagctggctggcgtggaagaggagctgcagcgggccaagcaagaggtcctttctctgagaagagagaattgtactctggatactgaatgccacgagaaagaaaagcacatcaaccagctacaaacaaaagtggccgttttagaacaggagatcaa

SEQ ID NO: 786 - DNA, 205 bp, Homo sapiens
  misc_feature (1)...(205): n = A,T,C or G
tcctgaaatgtattgcccagaggaggctgggaaattccagatcagaatactcncaggttatgtctnctgaaggcccatcatttgacctacagaaatccatcctctttcttgtcctcatggcagaagactgagggagctctctgggagtttcttatgagagcattgacccntgaangttncactctattatctgatcaccacatca

SEQ ID NO: 787 - DNA, 264 bp, Homo sapiens
tgagggcataaaaccagccagcttcaataaagtcacagaccctgaagtgaaagaaataattgaaggatgtattagacaaaacaaatctgaaaggttatctatcaaggacttactaaaccatgcattctttgctgaggatactggactgagggtggagttagcagaggaagatgattgctcaaattcatccttggctctaagactctgggttgaagatcctaagaaattaaaaggcaaacataaagacaatgaagctattgaata

SEQ ID NO: 788 - DNA, 477 bp, Homo sapiens
  misc_feature (1)...(477): n = A,T,C or G
agatggaaaaaagaacggctcaagagaaggngaaataccagccataactatgaaaccaccanccttaccagagtgttctgcatggcctgacgtcccctaccaggcagaacancaccccatccncangctncatnggctgtnccaacagctntggnctacagtgaaggtagcagctcacctaatcacccggtggagcccttacccctgggcagtggatcaccgtgctnccatcagcctgtattcaggatgcacagcagtgngcttgcatcnaaaccgcttntcacaantctgangnctctttgccagctncnnaggngctgacctnctgaagangnccagagatgatttgatncaggtttgtggncctgcatatgggatncgactnttcaatgccatcanaggcaggaatgtgaggccaaagatgaccatctatgtctgtcaggagctggagcaaaaccaactacccctgccacagtt

SEQ ID NO: 789 - DNA, 468 bp, Homo sapiens
  misc_feature (1)...(468): n = A,T,C or G
gactgagatggcgtcgtcgagccccgangccccttgntcctgcgactgttntgtctctgtgcccccggcctnagccatcccagctgtaatctttgcanagaactcagaccggccccgagatgaggtgcaggaggtggtgtttataccagcaggcactcacagtccctgggagccggcttcagtgtacctatatcgaggtggaacaggtggggaagacacacgctgtgattctgagccgcccctcttggctgtggggagctgagatgggggccaacgagcttggtgtctgcattggaaacgaagcagtgtggaccaaagagcctgtggggcagggggaagccctgctgggtatggacctgctcaggctgnntntggancnnancagcnctgctcannaggctgtatcacgtgattgtaggctctgntggacngctatgntcngcctggcagcctccgtaaaggatcctg

SEQ ID NO: 790 - DNA, 141 bp, Homo sapiens
ggatttgcgaaagcttgaggcgttacgtacagcagtgatgacgattaattctacgcgatggaatcaaaggactttcttcctggatgtcttctgcattctcacattttaaagagtgggtgggagtgggcctgtttggcgcaa

SEQ ID NO: 791 - DNA, 240 bp, Homo sapiens
  misc_feature (1)...(240): n = A,T,C or G
actgaggctgaatattctgaactggttgagncattactgtcaagtcaacaagacccagtcatttaccagagattagcagatgccttcaacaagctcacagcgagcagcactcctcctgccctggaccggaagcagaagatggccttcctaaagagtttagaagaatttatggcaaatgttggtggtctcctttgtgtaaaataaacaaacagagctataagcttaacttaaaaaaaaaaa

SEQ ID NO: 792 - DNA, 169 bp, Homo sapiens
  misc_feature (1)...(169): n = A,T,C or G
gcttactacgaccganncgnttccttcatccgctctgctttccgggatcaggcctcgaggctgggagttcctgtgggggtgctatctgccaaagtgtttgctcgcagtgtgcagcaggtctgcgtggagcccagccaccccgtgctgctcagcccggaacaaagtgtga

SEQ ID NO: 793 - DNA, 156 bp, Homo sapiens
  misc_feature (1)...(156): n = A,T,C or G
aggatgaagaggttctttctactgancatntttctccacangtcacaaannaggtgcttggtccagaactggtccatgtatcaganaagaacctgtcagagattgagaatgtccatggatttgnttctcattctnatatntcaccaataaagccca

SEQ ID NO: 794 - DNA, 375 bp, Homo sapiens
tgagctacgccgcaggaatggggcacttaagtgcaccttctctgcagctggccacagcactggcctcctgcagggcctggctgccctccgtgcacagggccagctgctcgatgtggtcctcactgtcaacagtgaagcctttcatgcgcacaaggtggtcttggcggcctgcagtgactactttaggaagccagccccactgtcttccaaatgagtatgttctctggtgatctaaggtgtcccttgctgctcagagtcatggatgtcatcgttgtacggccgctcagcacatgagtaattaatcccagtcctttgctgcagcctctgctgatcagtcctttgatttaataaaggcattatggaggaaaaaaaaaa

SEQ ID NO: 795 - DNA, 332 bp, Homo sapiens
  misc_feature (1)...(332): n = A,T,C or G
gtactaaacccaggatcaacacaccctgntttccgaatctggctgacgagttacccatctccaaatttccctgtgtcggtcctgcagaatggagtaaaaatgaccaacgaagcacctgaaaggattgccgggcataatatcatcccgatcatacctcatggaccccatctctgaccctgaattctttgacagctgcaaaaagcctgttagtgatggctaagtcctgtcaccccagccctgtaaagcaattcaagtggcccctagngatcagggatgtgtgcatagagtaaaactacaaattaaatagaccccctgctctgcaaaaaaaaaaa

SEQ ID NO: 796 - DNA, 542 bp, Homo sapiens
  misc_feature (1)...(542): n = A,T,C or G
ttttggggtaaccgcggggcgtgntttccagccatgaancgcaggtgccgtcccctctgtgcccactctgccgtttgcccttcgaccccaagaaagtggacaaggccacccatgtagagaagcaactctcatcctacaaggcaccctgtcggggttgcaacaagaaggtgacactggccaagatgagagcgcacatttcctcctgcctgaaggtccaggagcagatggctaactgtnccaaattcgtccctgtggtgcccacatctcagcccatccccagcaatatccccaaccggnctaccttcgcctgcccctactgcggagcccgcantctggatcagcaggagctggtgaagcactgcgtggaaagncaccgcagngatcccaaccgtgtggtatgccccatctgctcagcaatgccctggggggaccccagctacaaaagcgccaacttcctgcagcanctgctgcaccggcacaagttctcctacgacaccttcgtggactacagcatngacgaagaagcttaccaccacactgaa

SEQ ID NO: 797 - DNA, 192 bp, Homo sapiens
  misc_feature (1)...(192): n = A,T,C or G
gggttctgtgttgccacagcatgctgctcttcatcttgctgctcatcacntgtagtcctggctacacgacatcgtcacagcggaggatgcaagacgtcggacaaaaaagctgggaagtcaaaggggaaggatgtgaacatggtggagtttgctgtagccacaagggatcaggcctccatataggactgagga

SEQ ID NO: 798 - DNA, 318 bp, Homo sapiens
gactgaggtattgcagactcctgtgtacaagttggaaacatctctgtaagcctttatttacctgtctcattggaaatctcattgtctgcacaaggaatgcaatcaaagcagcagacagccttcccctcctgggcagctttcctgaatccaggcctacagctctcactgcacacagactgaggaatctaggaggaaagaaatctactagcaaatgcttggaatttttgaaaaatccaaatttttggaccaattctgagtatcattgaagagttactttgtaaatgcttccaataaaagttgaagataatgaaaaaaaaa

SEQ ID NO: 799 - DNA, 438 bp, Homo sapiens
  misc_feature (1)...(438): n = A,T,C or G
ctgcacacagagcaatgccagctctgcccctggaccaactccagcatcacccacaaagacccgaagacaggacagagcgaagacttcagcagcgctgaaccctgagcaganggcagaccggnattttgngttggacaaaccgtcccctaaagacaacattcccgccctagtggaggagtacctggaacgtgccaaccttcncagctaatagacctcgactgggtcctggccttgcctnacgatanattctggtgccaggttatttntgatgagaccctgcagaagtgcctggactcctacctncactatgtacccncanagtntgangagtngggtgnncccgacccntgaggtggctgacatgcagaattcacctgcaccggagttgttttcctnaccacctncgggaagggcctgnntggcattgagaccttgtat

SEQ ID NO: 800 - DNA, 446 bp, Homo sapiens
  misc_feature (1)...(446): n = A,T,C or G
aagaacagacgttcactgacatggccagcgacctagcactgtgccactcancagcgtnccccaggtcagggttctgaagaaaagctcggcagcagttccttgtgctcctccagggagcttctctgcttgnagcttcttccgcagaactcacacttgtacggcttntccactagaaggaagactcanggattatgtgnngtatatacacgtgagaacaagcatttggngngaccggagctgttgnaccccctnnagatggagctgaagttggntataaggcaacaagatatggatgtnaacacggtatcctgnncctctggaagagcantctgngntcctaaccactgngtcatttgnttcagcgcttacgccccacccctgttnatattttataattaatttncangctgnacntanttgagcattgtatagctttcctgaatagg

SEQ ID NO: 801 - DNA, 145 bp, Homo sapiens
  misc_feature (1)...(145): n = A,T,C or G
gactgaggcaccaggcactctgggnccgctacatgggcaccctccgtggctgccttctgcgcctctatcatgattaaagcccttttccttcctccctccgacataccctgagaataaagttgccataagtttggaaaaaaaaaaa

SEQ ID NO: 802 - DNA, 512 bp, Homo sapiens
  misc_feature (1)...(512): n = A,T,C or G
tgtgtggagggcaagtgctgccacgggtaggngtaaacctcctggctcccagaggtgcaccaaacccagntgtgttccgccatgccagaacaggagggatgtgtntacggnctcagcctctgtgtgngcaagccagggncaaagggcaaagcctgcgagatcacagntgcccaggacaccgtgccagccagcctttggagggcagaatcctgggtcttcgtgggccccccttgagcangcagcaaaacatacgtnaaccaagaaggcanacaccttgcccagggtcagtccagtggcccanatgaccttgaccctcaagccaaagccatcaatgggactctcccagcagatacatnctcatttgnagtgctggctgctcttncaanaggncttatgggactcaattccctgcacctacgtgntcgntcacagttntntgctnnctcnaggtcnaggttggatctgtanncttnataggcntgcgcatggaccattgcatacacagcatggcc

SEQ ID NO: 803 - DNA, 196 bp, Homo sapiens
gagctcctgctggacatcaggatgccattgccactgaaaagagtgacctactgaacgagctgctggagtctctgggggaggtgcccacggtggagtcctttctcggtaagaacagtattccagtcctccctcatttatttaaggggtaataactaccattgcctttttttttttttttttttgggaaaaaaaaaaa

SEQ ID NO: 804 - DNA, 405 bp, Homo sapiens
  misc_feature (1)...(405): n = A,T,C or G
gaggctggaggggtagcaggcgtctctgtggacttgatattatttcctctggacaccattaagacaaggctgcagagtccccagggatttaacaaggctggtggatttcgtgggatatatgctggggtcccttctgcagctgttggatcctttcctaacgctgctgcattttttctcacctatgaatatgtgaaatctttgctgcacacggactctacttcacacttcaaacccgtgaagcacatgcctggctgcctctacaggagaagtggtgagcnantggatacatgtatacagcntcncagaaatanaagagnangcctgtgtaatgattctttaaaganctttgcanaccttttctgactncnctntncgtgaaagaggttattcaaaggactgttcccg

SEQ ID NO: 805 - DNA, 399 bp, Homo sapiens
  misc_feature (1)...(399): n = A,T,C or G
tgagttgcctcatggcaccgatgaanactggctnnagaagctgtgnaacacttttgtcaacaagaantcganattcgnnaagcctagantggcaaactcatccttcatcatccaacattttgctgacaaggtggagnaccagatgtgaagggntcctgganaanaacagagacacatgtctatgacatgcttgntggagatnctcagagcatgcanggtcagcagggtccccagggaggggtacaggctgctgctcattgtgtagctcacacaaggaagggtagagttggagagaggggagcttacttgagtaacagcagcacctccaagtggtgttttcatttccttctttttcccagttgaataaaattccagtatatccatgcactaaaaaaaaaa

SEQ ID NO: 806 - DNA, 460 bp, Homo sapiens
  misc_feature (1)...(460): n = A,T,C or G
gactgaggtcttgatgcagagctttactatgtgagaaatgacctcatcagtcactacgctctgtcctttaacctgctagtgcccagtgagacaaacttcctgcacttcacttggcatgcaaagtccaaggttgaatataagctgggattccaagtagacaacatttgtggctatgggcatgccccaggtcaatatttctgctcaaggggaggtcccacgcactttatcagtgtttcgggtcgagctttcttgtaccggcaaagtcgactctgaagtcatgattctaatgcagctcaatctgacagtgaattcctcaaaaaattttacagttttaaattttaaacgaaggaaaatgngctacaaaaaacttgaagaagtnaaaacttcagccttggacaaaaacactancagaactatttatgaccctgnccatgtcgcgncaaccacttccacgcgtggg

SEQ ID NO: 807 - DNA, 533 bp, Homo sapiens
  misc_feature (1)...(533): n = A,T,C or G
actgagtggctcagatgtcttcaattccaaaaacctggccgttcaggcacaaaagaagatcctgggcaaaatggtatccaaatccatcgccaccacgctgatcgacgacaccagcagcgaggtgctagatgagctgtacagggtgaccaaggagtacacccagaacaagaaggaggcggagagggtcatcaagaacctcatcaagacggtcatcaagctggccgtcctccacaggaacaatcagttcaatcaagacgagctggcgctcatggagaagttcaagaagaaggtgcaccagcttgccatgacggtcgtcagcttccaccaggtagagtacaccttcgaccgcaatgtgctgtccaggctgctgaacgagtgccgagagctcctacacgagatcattcagcgccaccttaccgccaagtctcacggacgggttaataatgtctttgaccatttttcagattgtgattttttggctgccttgtacaatccctttggaaagtttaaacctnacttacagaaactttgcc

SEQ ID NO: 808 - DNA, 295 bp, Homo sapiens
  misc_feature (1)...(295): n = A,T,C or G
gggctgagggagagcctgcccagagnccatnatgncttacttgaggcantntgnangggcgnactggaaacatgaagtgtctgntccctatgccatgaatctgctcaacggaatcaaacttttcgggaggcctatcaaaattcagtttagatcaggaagcagtcacgcctctcaggatgccagtgtgtcatatccccagcatcatgttggaaatttaagcccaacctccacatctcctaacagctatgaaaggacagtgggtaacgtgtctccgacagcacagatggtccagagg

SEQ ID NO: 809 - DNA, 186 bp, Homo sapiens
agcatctgcatcctcattctcctctacgccatgtacaagtaccagcaaccgcgacgagggctcctaccaggtggaccagagccggaattacatcagtaactcggcccagagcaatggggctggtggtgaaggagaaggcccctgctgcccccaagacgccaagcaaggccaagaagaacaaagaca

SEQ ID NO: 810 - DNA, 548 bp, Homo sapiens
gactgagcctgacgtgtatccagagcctctaccgtccatagcgtgactccacccctgaagacattcgagaggatgagctttctctccagcctctctgagcccaggcggggtgagactgcatataaccaggtcacacactacgactttgtaaggcatactgtcatggtctagacatccagggaagcctctcaggggcaggctcctcagctgaccgtcccggctgacctcaggtgcagagcttccgagcgtacctcgcatgagtgtgagcacagtccctttgtagaagccgcggatcccgaactcctgatacagcttctttgcgcagtccaaggtgccactgtacttgttctcccctgaagaagcctgaatctgggagggatggaaggtcaccacatcaaaaacagcagtaatggaactgacagacccagcaggtctggggcttcctggctagctggcctagcttcatcactgagcctcaggctagtgagaaagcctgtctcaaacacaaggtgggtgagtccttagggacaatcaggcctccacatgca

SEQ ID NO: 811 - DNA, 270 bp, Homo sapiens
  misc_feature (1)...(270): n = A,T,C or G
cctgacatcctcaagatcactggaggccaagctggctgantgccaagaccagctgcaggnnttcnagaggnagaacatntanctcacantcatcatttcanacctgcgcattcggntnaggtactggcanaagggatcccacnatctgtcccgatcaggggcccgcttaccgagatgagctgcacgccccccaagggaggaccacttnctttttnttggctgccgatttntgaaaggagtgngctatcatcantgctgtgaaataaaagt

SEQ ID NO: 812 - DNA, 292 bp, Homo sapiens
  misc_feature (1)...(292): n = A,T,C or G
gtctatgatcttttcccanggaagntccagttacctccacctagagaaacatctgtagcatnaatgagtcagacaagcggtggtgaggcaggctcgcctcctccagctgtagttgctgctggtatgcatttcattttacttcattaatgaaaactagggtactatctggccaacatgaacagtattggaaaagtttatatcaaaaagagtatgatttgaggnttttagacaggtctaaagactttaccctttacgttgaaaggttttcggtgtgtttttttttttttaaaaa

SEQ ID NO: 813 - DNA, 430 bp, Homo sapiens
  misc_feature (1)...(430): n = A,T,C or G
actgaggctccaaaaacaggtggncaagactttgtgaaagcagaaaagcaaaggttgcgggctgagaagaancagcggaaggcagaggtcaaagagcttaaaaagcagcttaaactccacagaaaggttagtttaccattagaatagatgggaagaaggctctgtcaagagttctaggtctcatttagtttataaagggaagctttgggtccagatggtgaaagaaaaggcaacacaacactaaagattttattcatgtttgagaaaaggtatctgaactccagctcaaaggggatagttaaaatagtattatttaacttagttggtatttataataaatggcgatcttaattactcataatatgtttatttacaatctaactcttgaatgcttctaaataaaccacaattcaaactgcacacaaaacaa

SEQ ID NO: 814 - DNA, 509 bp, Homo sapiens
  misc_feature (1)...(509): n = A,T,C or G
gactgagagcccgccatggagcctccgctgcccacgccgatgctactgctgttgctgctgctgctctccagttccgccgcgctccctgcacctcccaggaccccaagacactcagacggaatgttcaccagcgagctcagccgcttgcaggacagtgccaggctgcagcgcctgctgcagggtctggtggggaagcgcagcgagcaggacacagaaaatatcccagagaacagcctggcccggnccaagcccttagaggaccagctctgcttgctgtggtcgaacactnanaccctacaggactggcttctgnccaggctgtccctggatgggtccctgtctntctggctgcctcctggaccaaggtctgctgttgatcgttcanagtggactgaaacaaccaggccacccagatgagggaggaagagtctctaggaccctggctggagtagggatttggttgtccttggcatcaataaaaaaggaatttagaccctgaaaaaaaaaaa

SEQ ID NO: 815 - DNA, 489 bp, Homo sapiens
  misc_feature (1)...(489): n = A,T,C or G
gatatgaatgcctacatcaggccctctcctaccagngggactctaggaggagtgacaaggaccacaaatgaagccattgtgttgtgtgaaggagggggctatgacatcattcttattgaaaccgtcggtgtagggcagtcggagtttgcangtggcgtgacatggtcgatatgtttgttttattgctgccaccagcaggaggggatgaactgcagggcatcaaaaggggcatcattgaaatggcagatttggttgttataactaaatctgatggagacttgattgtgccagcccgcaggatccaagcanagtacgtgagcgcactcaagttgctccgtaggcgctcggaagtctggaggccaaaggtgattcgcatttctgccagaagtggagagggcatcactgagatgtgggacacaatgagagagtttcagcaccaaatgctggccagnggggagctggctgccaagagacagacacagcacaaag

SEQ ID NO: 816 - DNA, 554 bp, Homo sapiens
  misc_feature (1)...(554): n = A,T,C or G
gactgagccgcggattgcaaagacagncccgggttcccagtgaagaggttaatacaagcccgcttgcccttcaaacgcctgaaccttgttcccaaggagaaagttgaggaagacacatcaccaaaagcagctgtggaaagcaaagnccngnntctacaatngtctttgngcacttttgaaagccagtgtnacacaggctctcacgnaggcattgagtacaaagatggcanggtggccagggccccattgatagcttnttgagggcaacaatcaagccagtaccgagtgtggtcattatcgacctgacggagaactgcagtgacattccagacngccctgaggnccacagngaactaanncctgacactgcctggtgtggtcaccacagtggaaggagctgccaagcagcaggatcactctgcagcagagctgtgtctcttagagaccccttcagacatcacttgtcacatggaagaggagcctgggagtccaggagacccaaagaggacgggtgactgtcaggctggttcactacagagctgtccggagctgac

SEQ ID NO: 817 - DNA, 270 bp, Homo sapiens
  misc_feature (1)...(270): n = A,T,C or G
ctacctctggatgcggatgctctggtcttggtggccctgagtcgctatcatcacatcagcctcgtccagaacaaacaccttgatcttatttggggtcaatgaacttcagcttggagcaccagtccaagacggtcccgggggtgccaatgacaatctgctcactcaccttctgacctctctccactgtggaaaaggtaagttttctttacatgttccaaagagaaagccagntctggaaataaaaatcttctacattgtcaaaaaaaaaaa

SEQ ID NO: 818 - DNA, 196 bp, Homo sapiens
gactgagttccctgcagtttgtgaatttttacagaacaacagtttattatcaataatcagagcccatgaagcccaggatgcggggtaccgaatgtataggaagaaccaagcaactggctttccgtcacttattacgattttctctgcccctaattacctagatgtctataacaataaaggtaaagaagtccagcaa

SEQ ID NO: 819 - DNA, 463 bp, Homo sapiens
  misc_feature (1)...(463): n = A,T,C or G
tgcgtgactggctgaggatagncaactgtcatcatgccccactcatacccagctctttctgctgagcagaagaaggagttgtcaggatattgctctacggatcgtgacccccggcaagggcattctggctgcagatgagtccgtaggcagcatggccaaaaggctgagccaaattggggtggagaacactgaggagaatcgccggctgtaccgccaggtcctattcagtgctgatgaccgtgtgaaaaagtgcattgggggggtcatcttcttccatgagacactctaccagaaagatgacaatggtgtccccttcgtccgcaccatccaggataagggcattctcgtaggcatcaaggttgacaagggtgtagtgcctctagctggnaccgacggggaaaccaccactcaagggctggatgggcctnttggaacgctgtgctcagtataagaaatgatgcag

SEQ ID NO: 820 - DNA, 471 bp, Homo sapiens
  misc_feature (1)...(471): n = A,T,C or G
actgagataaagagaagaagaactcaccaagnatttgtgacgagctgatcgccaagatgggaaaaagctaactctgggccaagtgcgtggacttggccgttgcgtgcaatacgagcgtcggctcaactgtttgtccttccgattccgtgaacagcgtctcctttcacttccgtatgcactactgtgtcctctttctaaataaggttggtttgaccgtatgcagtgccgagacctaccaggattccttgctatccgtttgcattttctagtataattcatagcaagttgacctcggagttcctgtatcagggagactgtcagattctctaatagactacaaattgctggccttggccttggcctttggcgagcagcatctgatgggacgtgaacatatgcatcgggactcttgccttaaggagtgtacaattgatccacatttgctggtttggttttttaggaaaaaaaaaa

SEQ ID NO: 821 - DNA, 548 bp, Homo sapiens
  misc_feature (1)...(548): n = A,T,C or G
gactgagatgctaaagaaggaagaagcaattccttggcctggaccttagccattgttcattcctacatcgcctacaaagcagnaaangantagcgatnnaacnnaagctacttaaggaggagttcanatttaaaacaggagcgggaacaactggagcagaaggtcaaagagctcagcagttctataagtaaatgtatggagatgaagagcagcatcctggcgcggcagaaggagatgcgcagctccctggacaaggtgaagcggctcatccgccttgtgcatggcgtcgacctctgcagacctgtggactcagaggccacggcgggggccctctccaatggcccagactgcactccccctgccaacgccgcctccacacccgccccttccccctcctcgcagagctgcacagcgaactgtaaccagggggaagagactaaataacagagccctcgaggcggacatgccacagtcctggtggcgaggagacgctagaagagcaaagccggatttcttctggaaagtacagagttcttttggttctttgg

SEQ ID NO: 822 - DNA, 383 bp, Homo sapiens
  misc_feature (1)...(383): n = A,T,C or G
gactgaggaggtgagtgcttttggggaagaggtgagggtgatgacctggacctgtggacagtccgatgttctgggcaacactgggagcgagaggccagtgtccgcttccagcacgtgggcacctctgtgttcctgtcggtcactggtgaacagtatggtaaccccatccgtgggcagcatgaggttcatggcatgcctagtgccaatgctcacaacacgtggaaggcaatggaaggaatcttcatcaagcctggagcagatctctccacgggtcacgatgaactctgagaaccagatgagtgatgggagggtggctgagtggcaatctcggggtcactcttgtgtaagactttgtttgtangggccctcaagtgcctttatga

SEQ ID NO: 823 - DNA, 266 bp, Homo sapiens
  misc_feature (1)...(266): n = A,T,C or G
atgatatgcctacaattnctcantaggtagataccnctccctctacattgtctatgagtttctgatgtctggttggcatgagtacctacacctggcgctgtgaccccatagacttttccaatagccctgaagcacttctggatggttcgagtggcctggctcttcatgctttccaaggtcattgagctgatggacacagngatntttatcctccggaagaaggacgggcaagtgnccttcctccatgncttccaccactcggtgct

SEQ ID NO: 824 - DNA, 163 bp, Homo sapiens
  misc_feature (1)...(163): n = A,T,C or G
tgagagtacgtcggcaggaattcaacgggcacagantcaaaaggagctctggagaattcaagatgtcatggaggggttgagcaaacacaaacagcaaagaggctcttcagaaacaggtctggcaggatcaaagcctttctcatcagttaagtacaagagcgag

SEQ ID NO: 825 - DNA, 409 bp, Homo sapiens
acctcttccctccttgcctccccgaaacttacctggcattgcacctctccccatgctgtccgacttcctcccgtcattccctttggttccagagggctcttctgcagccagcgcaggggagccgctgtcttcccttcctgccatgggcccaccttctgaccctgtcatgactactgcaaaggcagacgcctcttccctcactgtggatgtgacgtctcctgcttccaaggtccccaccactgttgaggacagagtcagcgactgcaccccggccgtcgagaagcctgtgtctgatgcagatgcttcagagccttcttaactgggaaccaatgttcagaaccgacgtggtctgtttagttaaccacggggtcaggtctggaatcgcaaactaccattgatttcatactag

SEQ ID NO: 826 - DNA, 484 bp, Homo sapiens
  misc_feature (1)...(484): n = A,T,C or G
tcgatttgcctacgacaggcctaggggtcgtccnatngncaaancgaaganncccagggacatggctntntcccagcacaaagctgacagacaagancgnnggctttacgatgcgtgcagatgatggncgtgganggaaggccatggcnctgngctcccttgggaagggcatccganagcccgtcagtgtgggtgctctttcanaagganaggtcntganagcangatgnncctgagcagaaagaagacacctttgacgtcttccgtcagcgcatgatgcaaatgtacagacacaagcgggccaacaaatagatcaaagccactggcgacagagataagccttgaagcanccttgcccttcccgtcaccctgccccggacgcctgcagcctgagcctcgttccagggtcacatccacaaggaccatggattccaaaagntgngctggnctggcctgccctggctccagtttgttcctgttcctg

SEQ ID NO: 827 - DNA, 256 bp, Homo sapiens
  misc_feature (1)...(256): n = A,T,C or G
tgaacatggctgggttcatgaaagcaaatgagagtgagagtggtctagggaaaagacggtgatacatcgctgacacctgcccgtccatcggcactgctctctgcagntttttgcagtatggcacgggcatacccaccatctctgccgaaggaagatggcgcatacagggattgttggagaactgtatccagtgtgagctttggggaggataaagttggtgtgcaaataaattgatactgaagcttaaaaaaaaaaa

SEQ ID NO: 828 - DNA, 565 bp, Homo sapiens
  misc_feature (1)...(565): n = A,T,C or G
aactgagcctccctctggtctgcttctcgaggttcaattcacagagcgcttcatatccacaaggatatgttcctaagacctccctgagctcaccaccctgtcaagaagtggttctgccggaccctgttgaagagacnagacaccatgcggaggttgtgaagagggtgaatgagctgatcgccacgggccantatggccggctctttgctgtcgtgcactttgccagccaccaatggaaggtgaccgcagaggacctgattctaattgaaaatgagttgnatatcaagtgtggagagaggattcggctggagaaggncctgctggttgnggcagacaacttcacactcctgggcaagccactnctncgaaaggagcttgtncgagttgaagccacagncattgaaaagacagaatcatggcccaaaatcaacatgaaatttaggaaaaggaaaaacttcaggaagaaaaaaatcattgtgaaccctcagaccatcctccgcattaacaccattgagattgcacctcgtttgctgtgactgcagagccgatgtctaagaagttctga

SEQ ID NO: 829 - DNA, 491 bp, Homo sapiens
  misc_feature (1)...(491): n = A,T,C or G
ggccctgacagacctgactcggaggngcaggncnagatancgaanctnggnctggagctggannttgcgtctcctnngatgctgactgngacntngagagntgngacgatgangagaactgngatctgatcancaatggacggcatanatgnccaggatggcctatncnctgnntttatntacgtagnaggngaggggccactgaaaacattcccaggacttaattcacttcctagaggtttttgctgcagagggattaaagcttacttcaagtgtacagtcattttcaaaacagctaaaagatgatgacaaacttatgcttctcctggaaataaacaaacttattcctctatgccaccagcttcagacaataactaagacatctttgcagagtaaagtctttctaaaggttgacaagtgtattacaaagataagatccatgatgactcttgtggtccagctcctctcactttgctataaactactgaaga

SEQ ID NO: 830 - DNA, 152 bp, Homo sapiens
gactgagaccccaccaacaactgaacgttttggccaagctgcaacaatggaaggaattggagcaattggtggaactcctcctgcattcaaccgtccagctccgggagctgaatttgctccaaataaacgccgccgatattagaaaaaaaaaa

SEQ ID NO: 831 - DNA, 183 bp, Homo sapiens
gactgagacctcctatgccccttcccagctgtacaagtgcagggccagcctagcagttctcagccttctccagtcagtgcgtccagtcagcatgcagatccagtgagaaaacctgggcagaacttcatgtgtctgtggcagtcttgtaaaaagtaaatggcggggttttgttaaaaaaaaaaa

SEQ ID NO: 832 - DNA, 402 bp, Homo sapiens
tgaggtttgggaggttgccgcaccgtacatcgagaaatacagaatggagcacattccagaatccagaccgctttctccaacagcgttttcactagaatctctccgaaagaactcagccacaatcccagagtctgacgatctttaacgggcttcctcgaggacaggcacatcagatgggcctgagcttagcacagcactggtgtgttgatggagagtctcaggaactgcctgtaatgtgtaaaactcatctcttttcaaacatactctggataggccatggcagcaatgcagtggctgaacccagaaccctgatcttgttttcttgttactatggtttgaggagtactgggtgccttctggttgtgggagttgtctttcttgataatataaacaggctactta

SEQ ID NO: 833 - DNA, 532 bp, Homo sapiens
  misc_feature (1)...(532): n = A,T,C or G
gactgaggtgaggacgtgagtctgagtctgtggaatgtctacagcagganggaccctgcgtctctggagaacatgcntncagaaattccctgcggnggcactggcggcagcccaggatctagcagcagctccggctcctcgagggaggactcagtgccggtgactatggtggccaccgctgggcaagtgcaacagcagcagcgacaccaccagcagggaaaagtgacagtgaaatatgaccataaggagcttcgtaagcggttggtgctggaagaatggatcgtggagcagcctgggtcagcctgtatggctgcaaggaagaagaaatgccagacgtagaaattgacattgatgatcttcttgatgccaaccgcaaggaggaaagagcttntaaattacaggaagctctcgtagtctgctataaaccaacagaggaattnatcagagagctgctctcccgaataagancatgaggaagcngaacccttcncanaagaagagcgtttgattttgcnacagggtaaaattctct

SEQ ID NO: 834 - DNA, 151 bp, Homo sapiens
taaaaaagtggcaagcctggccctttcttgctatctggttccagagacaaaactattaagatgtgggacgtcagtactggcatgtgccttatgactcttgtgggtcatgataactgggtaccgtggagttctgttccattctggggggaag

SEQ ID NO: 835 - DNA, 134 bp, Homo sapiens
  misc_feature (1)...(134): n = A,T,C or G
actgagagaaggcccgcttaccatttctgcacaggagagngtaaaagtggtatattacctgagcgctgtacccctttgaatccagaagtcaccgatgagatcaccatccagccaggagatatagtcatgctggc

SEQ ID NO: 836 - DNA, 404 bp, Homo sapiens
gactgaggtatggaagcctttgagcaggctgagcggaagctaaagccgaacccaagcctcctcttctccgatgtgtaccaggagatgcccgcccagctccgcaggcagcaggagtcgctggcacggcacctgcagacttacggggagcacgtaccccctggaccactttgacaagtgaggccctagccagcacaagggggtcctgctctgagtggatgctgccccctgtgctagtcagctgtgcgaacatgctgagcagccagggtggcattccagggtgacttttgctcctgttcctgctcccccaggctacttcactggggcaccatgtttgcagccattgctgcggctacttcactcccttcacctgttacagtgccttttaggggtgggaagggaccagg

SEQ ID NO: 837 - DNA, 225 bp, Homo sapiens
  misc_feature (1)...(225): n = A,T,C or G
atggggaagaagaagaatgtcccgaggagggtcatccactttgtcagtggagagacaatggaggagtacagcaccgncgaggacgaggnggacgnactggacaagaaggacgtgctgtccacatgtcgntccnacaaaactgtacctggggcccctacctatggttttacatgcctgngggccngccacatcaaccntctnagtgtgtgactttcttggagagaa

SEQ ID NO: 838 - DNA, 269 bp, Homo sapiens
gaggtctggatgaacgcacaggcctggtggtgagtagcccgacgcaggagacgaagcacatagcggggaaaccgatcctggataacaacgccgtgaatctcttctcctccgtcttggtggccctcctgctccccacagccgcgtcggggttttggccccgagagtgaactttcttttccttcccaagcagtcgatactggtaaggccagccagacttgcaatgtgaaaggttttttttcagtgaataataaattcagggaccttgggaa

SEQ ID NO: 839 - DNA, 241 bp, Homo sapiens
  misc_feature (1)...(241): n = A,T,C or G
gaccaataaggggagaactaagctgcctccgggtgtgnaccgcatgaggcttganaggcatttgtcancagaggacttctctagggtcttcgccatgtctcccgaggagtttggcaagctggccctgtggaagcggaacgaacttaagaagaaagcttccctcttctgacatccctgccggctcggctcgattcggctcgccctgtccgtgacagtaccttccttctgctgcttcgaggcc

SEQ ID NO: 840 - DNA, 111 bp, Homo sapiens
  misc_feature (1)...(111): n = A,T,C or G
gactgaggtgcgcgtgtcgacgaggccgccaggncggagcgatnctnacggaggaaggagcacgccaacngggnctgactgcgtacagaantgccccccctcaataacaat

SEQ ID NO: 841 - DNA, 408 bp, Homo sapiens
  misc_feature (1)...(408): n = A,T,C or G
actgaggcgtggaaggttcatctgatgggccctgctggctgcacaatgaacctgcgcaagacacatgttctctacaaggctacagccccgcagcaagggaaaggcccagcagcagcaaagtcaagcacctcagcacccaaggttggaagcaagatccccaccccaaagggaggccttagtaagagctccagcaggacatacatgctgacggtgacagagtttccagttctgtctctgacaggctgtgcaaggttccccgctctaagccatgtgtgttggcatgcntgatgcagggctccatgcccactgtcccttggcctctggtgtcccagtgtctactctcacaggaacagtacatgttatgaccaaagagccctttccagtgtggccccagtcctgggcctgtgt

SEQ ID NO: 842 - DNA, 520 bp, Homo sapiens
  misc_feature (1)...(520): n = A,T,C or G
gaggggcgaaagcctgtctgnacagcaaagtacgtgagcaggaagaaaagtatgaagttcctggaggtccacagaggagcaggctcaacagagagcagctgttgccaaagctgtttgatggatgctacttctttttggggggaaacttcaagcatcatccaagggatgacctccttaagctcattgctgcagcaggaggcaaagtcctgagtcgcaagcccaagccagacagtgatgtgactcagaccatcaacacggttgcataccatgccaagcctgagtcggatcagcgcttctgtacgcagtacatcgtctacgaagacctgtttaactgtcacccagagagggttcggcagggcaaagtctggatggctccgtccacctggcttatcanctgtataatggcctttgaattgcttcctcttgacagctgaatgtcataccaggtgaacattttaagttggacatgcatggtttgtaagaacaacggccattgtgatatttctgggacattcatgta

SEQ ID NO: 843 - DNA, 137 bp, Homo sapiens
gactgagatccttcagtgttttactgatcctctggccaaagaagaagaaaatgttggcatagatattactcaacctttgtacatgcaacaacttggagagattaatattacaggagagccatttttaaaaaaaaaaa

SEQ ID NO: 844 - DNA, 503 bp, Homo sapiens
  misc_feature (1)...(503): n = A,T,C or G
tgaggctttctgtctcaactggtctctgacaagcctctgactgagtgcattcgcgctggccactacgcagcaagcgtcatcattagacgaactggctgtacctttcccgagaagccagacttccactgatggaagaaagaaaactcaggctgtggagtggagactgcagtgaccacatcctgagcgttcctccataagaaagaatagagttatcctctgtctttgcccaccatggttctcattagtaacttagagggctcagtgctacttctaggacctttagtctctgaaatctgggaaaaatgtttatttgcatagtttgttagtgcctcttaaatgtcaaacaggaatacatttcagtagaaactttaatttcattttcaattgtttgtaaattcatcagtatttagtaaattgatcttttttttatatttntgcttccaatgcaggngcaatnnaatataatagactttttaaagaanttanngctaacatcattcttg

SEQ ID NO: 845 - DNA, 154 bp, Homo sapiens
  misc_feature (1)...(154): n = A,T,C or G
actgaggtgctacctcatactctatcatgccatttttgtgttctttgcatggacctactggaagtctatcttcacactcccacagcagccaaaccagaagntncanttgtnctatacatgacnaggnncagctatcaaaatgaacgagagacca

SEQ ID NO: 846 - DNA, 218 bp, Homo sapiens
aggctcacctgcttgaagtccaaggcctgcaagttcggattagagatttggaggctgaggtgttcagactactaaagcaaaatgggacccaggttaacaacaacaacaacatctttgagagaagaccatctcccggggaagtctcgaaaggagacactatggagaatgtggaagtcaagcaaacatcctgtcaggacggcttgagccaaggattgctg

SEQ ID NO: 847 - DNA, 309 bp, Homo sapiens
  misc_feature (1)...(309): n = A,T,C or G
acagaggatctgcaaaaggacaggagattctgcactgctatgggcctcacgagagccggatgggcgttgctgagaggcagcagaggctgagttctcagtacttctttgactgccgctgtggggcctgtcacgctgagacactgagagcagctgcagctcccagatgggaagccttctgttgtaagacttgcagagcgctcatgcaggtaaatctctgctgttcccaggggcagggctccagctaaaggttggcagtcngccaggagaaccattcctgcttcccttcttgtaactcctccctacatgtcg

SEQ ID NO: 848 - DNA, 192 bp, Homo sapiens
  misc_feature (1)...(192): n = A,T,C or G
ttcttgtggggggaagcacaccatcttcaatggaagaatgatncatctaatctggatccatctcaggctccnggcctggctcagcctctggtgtttagtaattcgaagcagaatgccatatcacagccgtgcttcagggagtacattttctcaccatagcatggtgagcatgttggggaaaggatttggtga

SEQ ID NO: 849 - DNA, 205 bp, Homo sapiens
tgaggtggggtctttcactgcgaagaactgggtgagatgtggtctgagcaatctgccaaagataaacaaccgtatgagcagaaaggggctaaactaaaggagaagtatgaaaaggatattgctgcataccgtgccaagggcaaaagtgaagcaggaaagaagggtcctggtaggccaacaggctcaaagaagaagaactgaacca

SEQ ID NO: 850 - DNA, 307 bp, Homo sapiens
  misc_feature (1)...(307): n = A,T,C or G
gactgagaacgtcaagaagaggagattcgatcccactcagcanggccccatctgaatcgtctgcactggaggaatgccaccttgcacnggngggttctgggaatgacatgttttcagccatgctgccggaactcttaagtctgtaaagaagacccttgggtggtaatgacatacagagcctcagatctgagaattgggatggggtacaagacaaaggtcccttttggaaataacttcanggnnnccccccccatcacctgtcaataacggggaggggttaaagaccatgtcattaaaaaaaacaaca

SEQ ID NO: 851 - DNA, 191 bp, Homo sapiens
  misc_feature (1)...(191): n = A,T,C or G
tttgtggctttccagacggccatggcctcttctacctggttgcctgccttactagtgggagctaacacctttgcctcccacctcctcttcgcagtaggcatgcccactgntcctgctntggcccttcctgtgtgagcgtcaagggccaaagagaaggcagnccctcccggcaagtgagtctgaagccagag

SEQ ID NO: 852 - DNA, 462 bp, Homo sapiens
  misc_feature (1)...(462): n = A,T,C or G
attgaggtaaagtgctgtttgtacgcaccttgccaacacggtaacagaagaaattttagaaaagtcatttagtcagtttgggaaactggaacgagtaaagaagctaaaagattatgctttcattcattttgatgagagagatggtgctgtcaaggcatnnngnanaactnnttnnangngactcctngggagantncntcgcaattgtntttgctncgccaccgtancaggaggaggagagaatgaatccctcagaggcnggcaccgaaagaatcaaatgatatgatgattactacatatnatggtccacctcatatgcctcccccaacangaggtctgagggctgtggaggtagaggtggcgtatgtgatatcctccagattattatgganacgaagattattatgatnattatggttatgacttaccatanctatcggnggngggatatgaagatcccat

SEQ ID NO: 853 - DNA, 202 bp, Homo sapiens
  misc_feature (1)...(202): n = A,T,C or G
ggatagtgtaactgattnccaaatcgaagggaaatcctttcaaggaggccttcctacaggaaaattttgaatgacttatcttctgatgcaccaggggtgccaaggattgaagaagaaaagtcagaagaggagacttcagcccctgccatcaccactgtaacagtgccaacccccatttaccaaactagcagtaaaaaaaaaa

SEQ ID NO: 854 - DNA, 384 bp, Homo sapiens
  misc_feature (1)...(384): n = A,T,C or G
ggactttcgaagtaagcatgcaatccatattcccaccaattcccaagtanccatgagtcatccgaggagtgggaggaagtnctgaagtgnaaatgacacagcactgggcagactcnggancaacgggntgcangaatggnagntttggaancaccatgtctgagaaagactgnngcgactcctntctaggaacacgtgccgatggccggcaaacccagaggccacagcatcaccgtggctgtggctgtggcacacggtcggaatgttttcctaaagctaagacaacaattgaattacctagaagttctcagaagggacctggaggaaatgttgttgtttagaacaataaaccatgtttcatagtcacaaaagtcgggggggggg

SEQ ID NO: 855 - DNA, 523 bp, Homo sapiens
gactgagttagaagacctgaagatctaaagtactaacacctgaagagcaattagcagataaactccggctaaagaaattacaggaagagtcagaccttgaattagcaaaagaaacttttggtgttaataataccgtttatggaatagatgctatgaacccatcttcaagagatgacttcacagagtttggaaagttactaaaagataaaattacacaatatgaaaaatcactatattatgccagttttttggaagccttagttcgggatgtctgtatttcattggaaattgatgacttgaaaaagattaccaactcattgactgtgctctgcagtgaaaaacagaagcaagaaaagcaaagcaaagccaaaaagaagaagaaaggcgtggttcctggagggggattaaaggccaccatgaaagacgacctggcagattatggtggatatgaaggaggctatgtacaagactatgaagacttcatgtgacactttaccttctgctgtcttctttctttgccagc

SEQ ID NO: 856 - DNA, 419 bp, Homo sapiens
gactgagacatggctctttatgccgacgttagtggaaaacaatttcctgtaacccgcggccaggatgtgggtcgatatcaggtgtcctggagcctggagcacaagagcgctcatgcgggcacctatgaggtcagattctttgatgaagagtcctatagcctcctaaggaaggctcagagaaataatgaggacgtttctatcattccacccctgttcacagtcagtgtggaccatcggggtacctggaatgggccttgggtctccacagaggtgctggctgcagtaattggcatagtgatctactacctagctttcagtgcaaagagccacatccaggcctgagggcagcaacttcagccgtccattgcttctttcaataaacagtcactatttgacatgagtacattcaaaaaaaaaaa

SEQ ID NO: 857 - DNA, 520 bp, Homo sapiens
  misc_feature (1)...(520): n = A,T,C or G
gactgagttgccgccatcatagccgacaatgcgggctatgacagtgcagatctggtggcacagctccgagctgctcacagtgaaggccatataactgctggactggatatgaaggaaggtaccatcggcgatatggcagtactgggtataacagagagttttcaagtgaagcgacaggttcttctgagtgcnggctgaagcagcagaggtgatcctgcgagtggacaacattatcaaagcagcaccaaggaaacgtgtccccgatcaccacccctgttaagcattcccatttgctgatgaactctgggccagttcatagcaaagttgtacttggaagacttcaacctttaaagaagactggtggaattgacctgtccatgatagccttaagtttgaacattagctgaccttctgtgttaaacatgggtctaatttatttactgtttcattttccatacaattcagttgatttacaagttcatttctcatactgtgtattaaaataaaaatccagttactc

SEQ ID NO: 858 - DNA, 177 bp, Homo sapiens
  misc_feature (1)...(177): n = A,T,C or G
tgagcgtgaagcccttctcacaggcaccgttctccgtgtcactgacgcccccagcctctgacctaccagggtacgagccgcccccagccctctcaaccctgccaccttnctttccccaagagtgatggnttatggttgaaggagaataaagntatttttaccaaatgaaatacaata

SEQ ID NO: 859 - DNA, 338 bp, Homo sapiens
tgagaagggtttttctatgtagccctcatctgtgggcttcaggtgggcctcaaattcacagagctcctccaccccctgcctcctgagtgctggaattaaaggacggaggctctggactcccacattctgaagagagacccatctgccagagggctgaaggtggccttgagggccatgcgtctgggtctcaggatgcccctgcctgagcccagtgagcaggactgtgagagcctgagagctggccaggagccatctcttggagccaggaagcctcaagagtcctccaatctggtcccggccagggataaagagagacccatttttctaaaaagaaaaaa

SEQ ID NO: 860 - DNA, 389 bp, Homo sapiens
  misc_feature (1)...(389): n = A,T,C or G
actgaggctgttatcagaaggtgcagatgtcaatgcaagacacaaacttggctggacagcactgatggtggcatccatcagccacaatgagagtgtggtgcaggtcctgcttgctgctgnagctgacccaaaccttggggatgagttcagcagtgtctacaagactgccaatgaacagggagtccattctctggaagtcctagtcactcgagaggatgacttcaacaaccggntaaatcaccgtgctagcttcaaaggctgcacagccctgcactatgctgtcctggccgatgactacagcatcgtcaaggagctgctggacagagtacatggncaannataggaagctgaaggcagaggancggngccgcttcccactggagcagcga

SEQ ID NO: 861 - DNA, 511 bp, Homo sapiens
  misc_feature (1)...(511): n = A,T,C or G
tgagggattatctggaacacataacggccattggccccaggactacaggaagcacagaaaatgaaattctgacggtacagtaccttttggagcagatcaagctgatagaagcacaaagcaacagccttcacagcatctccgtagatatacagcggcccaccggttcctttagcattgacttcttggggggcttcacgagctactatgacaacattactaatgtcgtggtaaagctggagccccgggatggagccgagtctgctatcctggctaactgtcactttgactcagtggcaaattcaccaggtaggtacttgtatttagtcatttaaagtcacaaagatagaacccagaaagtttattaacttagccccatataaggaccatttttctttgaccagcattttctcattgtgttagaagttaagctaattaatatgtttagagtctagcaatgtaatattcctttaagttcattattatcagngntattgtaattattaaatagtag

SEQ ID NO: 862 - DNA, 329 bp, Homo sapiens
gactgagggcgattgtggtggctctggctgtggaaaatgtgactgtcatggcgtgaagggacaaaagagcagcccaagggaagcaaagtgttgaacagcgttctgagcttggttatcccgattcgcagcgcatcgccttctatcgccttcttgacgagttcttctgaggggatcaattctctagagctcgctgatcagcctcgactgtgccttctagttgccagccatctgttgtttgcccctcccccgtaccttccttgaccctggaaggtgccactcccactgtcctttcctaataaaatgaggaaattgcatcgcaaaaaaaaaaa

SEQ ID NO: 863 - DNA, 420 bp, Homo sapiens
  misc_feature (1)...(420): n = A,T,C or G
gagcacacacctcccttactgaatatttcctcaatgataagtaccaagaagagctgaattttgacaatcccttaggaatgagaggtgaaatagctaaatcatacgctgaactcatcaagcagatgtggtctggaaagtttagctacgtcactccaagagcattcaagacacaggtagggcgcttcgcacctcagttctctggatatcaacagcaggactgccaagaactactggctttcctgttggatggactgcacgaggacctgaatagaattaggaaaaaaccctatatccagttaaaagatgctgatggcaggccagacaaggtggntgctgaagaagcctgggagaaccatttaaagcgaaangantncatcatagtatacatattnccatggcctttttaagtctacgttagtg

SEQ ID NO: 864 - DNA, 263 bp, Homo sapiens
  misc_feature (1)...(263): n = A,T,C or G
ggctctaggaaaccaagaatgaagtggcagatatgggccatcatctttgagggtgtgaaagaagatnggagaccctatcttggtggncttctttagcttggaccatgtgggtctcactccataatggtgtgaaagccacctcaaggcagggnagggtgcctgcaaccttagctntgttgccataaacccaggagcagaggaccacagaggaggaagtcctgcctagaggaacagaatggactgttggcggccgagctttgaga

SEQ ID NO: 865 - DNA, 328 bp, Homo sapiens
  misc_feature (1)...(328): n = A,T,C or G
taacactgcagtactatcgagggaggcgtnnccaaagagntcntncanctgantgcggaggannttnntaatccanatatgagatagtgtnnacactnggatcccagcatacagaaattattnnggtttaatccatcttcttttgaaactgagggtcagtttacctctgattggcatagtcctgggtctggctatttacaataattgtatacgtggatgtccattttcccatggttgtatacaggaagcctaactgcnggaactttaggaaccttncgtgacttgnnanactctnacccagganctatatcaagagttttaaaggatt

SEQ ID NO: 866 - DNA, 390 bp, Homo sapiens
  misc_feature (1)...(390): n = A,T,C or G
gtctatgatttgaggtgtgaccctgctagtgcagntgaaggcataaaaccaaggaaaagaaagacttttgctttgcctggaataattaaaaaggaaaaggacgcagaatctgtggaatgtcctgatgcagattcgcttaatattccagatgtagatgaagaaggtttcagtattaaaccagaagcaaatcanaatgataccaaagagaaccatttctactcatccagngactctgactctgaagatgaagaaccaaagaggtaccggatagagatcaagcccgcgcatccaaataacttgcatcacacaatggcttctttggatgaactgaaagcatccatagggaatataacattgnccccagcagnnatctggtttccttccatagct

SEQ ID NO: 867 - DNA, 423 bp, Homo sapiens
cggccatatactaacaaggtcattactttgtggtatcgtccacctgaattgctcttgggagaagaacgatatacaccagccattgatgtatggagctgtggatgtatccttggtgaactcttcactaaaaaacctatatttcaagcaaaccaggaacttgcacagcctagagctaataaggaaaaaagaggctcctctctgtctcttacatatacaaggttagcttcctgctttctgggccaggctttgaccacactgatgaaatcagcatccagtccctccatggaacaagagcaaagcagttttatgcttgttgttgataaatgaggaaaacgattagcttaaaaaatgtttacagttttaaaaataatgtttcaagctataaatgttgaaatggaaacctattttcttaaatgttgaata

SEQ ID NO: 868 - DNA, 512 bp, Homo sapiens
  misc_feature (1)...(512): n = A,T,C or G
tgagcttgtatacttttgatatgcgcgcactgggcactcctgttatggtgcacatggatcacgtgtctgcagtacttgatgtggactactctcccactgggaaggaatttgtgtctgccagctttgataagtctattanaatctttcctgtggacaagagccgaagcagggaagngtatcatacanaaacagaatgcaacatgtgatgtgtgtgaaatggacttctgacagcaagtacattatgtgtgggtctgacgaaatgaacatccgactgtggaaagctaatgcgtctgaaaaactgggtgtgcttacatcacgagaaaaagcagcaaatgattataaccagaagttaaaggaaaaatttcaataccatccacatgtaaaacggattgctcgccaccgacatctcccgaaatctatctacagccagattcaggagcagcgcgtgatgaaggaagctcggcgccgaaaggaaatgaatcgtcgnaacatagcaagcctggatcattttt

SEQ ID NO: 869 - DNA, 543 bp, Homo sapiens
  misc_feature (1)...(543): n = A,T,C or G
aactgagatgcccgaagaacaggcattcagtgttctggtcaagatcatgtttgactatggtctcagggaacttttcaaacaaaattttgaagatcttcattgcaagttctaccagttggagcgccttatgcaggaatacattcctgacctgtacaaccacttcctggatatcagccttgaagcacacatgtacgcctcccagtggttccttacacttttcactgcaaaattccctctctacatggtcttccatatcatcgacctgctcttatgtgagggaataagtgtcatctttaatgtcgcccttggattactaaagacttccaaggatgacttgctgttgacagactttgagggtnccttgaagttcttcagggttcagctccctaaaagataccgctcagaagaaaatgcaaagaggctcatggagcttgcctgtaacacaaagaatcctgctgtggctgtggagcctctgaaccatgtatctgnggaagccgacatttcaggcatgaaatgagtataagaaaagaaaacaggagagcc

SEQ ID NO: 870 - DNA, 430 bp, Homo sapiens
  misc_feature (1)...(430): n = A,T,C or G
gatactaagctagagaactgctgcactccagcctccntggtanatcangatcccaaacaagacntagtctccntgntggaagaagaagagccatcatcgngaaaggggaaaaaagccagcccangtagtctgannaaaatagcanggcccangacagcaggaacaagtgcanaactccnacaagatgatgagcatagngaggannagcagaagtcccanagcanacttactanngaagtgncactcangaagaaaagttncaacagcangaanagcaggatnccncactggtgagaanccctatnantgtnttgantgtggtnaagccttcntgcaaaatgcctcttttancanacatatgatnattcactcataagaacaanctgnngaagaagattaatgcnggaaacctgccgactgccctggtttg

SEQ ID NO: 871 - DNA, 106 bp, Homo sapiens
  misc_feature (1)...(106): n = A,T,C or G
tcttcatgcaaaagtgngcgcagaagtggttacaggaaangaaaaacagatttttttgccctcctccttgtgtgtatcttatgggcagtggttggaaaaaaaaaaa

SEQ ID NO: 872 - DNA, 365 bp, Homo sapiens
  misc_feature (1)...(365): n = A,T,C or G
actgagagtacctgaccgtgttctcccagnatgatcgccttccatgatccagagctgagtaatcacctcaacgagattggcttcattcccgatctctacgccatcccttggtttctcaccatgtttactcatgtatttccactgcacaaaattttccacctctgggatacattactgctcggaaattcctctttcccattctgcattggagtagccatcctccagcagctgcgggaccgtcttttggccaatggcttcaatgaatgcatccttctcttctctgacttaccaggtatgtgtctaaatgaaggaatcaccgaatgcaattttgactataaaatgatgtgctctctcaaaaaaaaaaa

SEQ ID NO: 873 - DNA, 369 bp, Homo sapiens
  misc_feature (1)...(369): n = A,T,C or G
gaactgagatttaatcactantgctncgcctggggatnctgtatagccctgctgcgggcttcattctcannagagcccagntctgacaanaacaactggacgccctcgtggcaaaggggaatgncttgaccanngagcaacaggaaaggaaggaagccntnctgagctntccgcagttacctngctgagagcttcatgggtgtttgtccccggcccgtacctgtctcaaatgctccatctcccggtaagagagttgatgaaactttaggttttgtttccacatgtctgcctttattcttctagcctttttgccatcagcccataacatctgtattcctgccccattaaagtggaggacagaaaaaaaaa

SEQ ID NO: 874 - DNA, 549 bp, Homo sapiens
actgagggctccttgtgtacgggctgagcctattgtgcttttctgcgcttcggcccttcggcgagccgaggcgggaagtggagatccaccggcagtacgtggcccagtctgtgcagcgtcttcatcctctacttctttaacctggctgtgctttccacctatctgccccaggacaccctcaagctgctcccgctgctcaccggtctctttgccatatctcggctgatatactggttgacctttgctgtgggccgctccttccgaggctttggctatggcctgactttcctgccactcttggccatgctggtgtggaacctctattacatgtttgtggtggagccagagcgcatgctcactgcctccgagagccgcttggactaccctgaccatgctcggtctgtttccgactacaggccccgctcatggggctgagccacctagagctgcacagggggctttcggcacttccctggaacagttgtaggcctggcctttgcccaggcaatggacctttgatgcgaggaaccttgctacttccccactggg

SEQ ID NO: 875 - DNA, 313 bp, Homo sapiens
caagtcaagtccattgaacgctttcttcgacgactggaattccatgccagtaagattgacgagttgtatgaagcatactgtgtccagcggcgtctcagggatggtgcctacaacatggtccgcgcctaatatattcttttgttaccactggggttggcagaatgcctgaaatgaagtgcctcccagccgcggttctgcacagtctttgccacacacagtgtcggaggcctggccatttggtcagcttgccttgcctcatcacatcccttgggtttgtattttatttacagagttttacagaaaataaaagaaa

SEQ ID NO: 876 - DNA, 140 bp, Homo sapiens
gctctgctgcctgcatgcagacatgctgagctctctgggccccaaagaagccaagaaggccttccttgacttctatcacagtttcctggagaagactgcggtgagatacctcccagctgcccctgtcccaaaaaaaaaaa

SEQ ID NO: 877 - DNA, 122 bp, Homo sapiens
  misc_feature (1)...(122): n = A,T,C or G
gactgaggacttcccgtttctgttgattttcaagtacgtctttgagtcgagtggaagacagaagaagtggtcctgaagaagctagagtatatttatgcanaacaacaagcactagaagcaca

SEQ ID NO: 878 - DNA, 255 bp, Homo sapiens
  misc_feature (1)...(255): n = A,T,C or G
cctggagtggctgtgctggagtggcaggagaagcgtagacccttctcggactccacagctttaatactggggagtagggtgcagtttcactagtagaagccacccctcctcctgcctnccaggtcagctgcttctgagcaggggctnctggcgactgtacctgcccagcaacctggaggacagcgtcctgaggtctnccaaggatggnccttgcccctgtatgnttccctaataaagccttttaacccaaaaaaa

SEQ ID NO: 879 - DNA, 141 bp, Homo sapiens
actgagggtaggaggcagagaggtccatgcacaatccccgggactggccttacgcatcgcatcagagctttgtttgaaaatgcgattcggagcgacaagggcaaccagtgtcccctactgtggaggatgtatttgaatttt

SEQ ID NO: 880 - DNA, 367 bp, Homo sapiens; identical to SEQ ID NO: 33

SEQ ID NO: 881 - DNA, 387 bp, Homo sapiens
  misc_feature (1)...(387): n = A,T,C or G
gactgagaagaccatgtntggcccagtgacgagacagcaggagacctgccgntgaaagataccggtctaaacctctttggagttggaggnttacaagaaacctcaactgcgctgcactgntgaanactcgccaggcagtgtcactgtgtcagccgtgaagaactggaagacagatttttgctgtttgcatgatgagaacattttacttaaacagcatgcccgcaagcaagaggataaaattaaaaggttatgataaaaagcttttagctttttttcttaactctgtaaagtttgaaggatatagtttcttataaacttaattgaaagccccaccttcaatcttttctggaacaggcaggttataaataaatagaatttttttaaaaa

SEQ ID NO: 882 - DNA, 508 bp, Homo sapiens
  misc_feature (1)...(508): n = A,T,C or G
actgagaatgttgttggaaaaggaaggaggaggcgcaacaccatctctgacagaactgggtatgactgcaaacacttgacccagaactgtgtgactggcattgtggagaaatcagctctcgccgcgtcgctgttgggttcaggaccatcaccccgagcagagggacaagtcgcctaccatttgcaatcctgcactgccgcagcacctcgttgaagccctcacagagcttgacatcgctctggntctgagcacactccagaaactgcttgatctctagagagcaaggtccaaaagactgctggttctgcagctgggctccctgaggctcctgcaaagacacagcatcttgtgttgagatgagaaagcacagggcaccacccaagggcagcgctcacacactgggagctggggaacaactggnganaggtgcaagtttaatgncnnccaggaccatgccnntgaanacgntncaangaacacccnatcccctcccccaactcacaaccac

SEQ ID NO: 883 - DNA, 511 bp, Homo sapiens
  misc_feature (1)...(511): n = A,T,C or G
tctgcacagctacccacgatggggaggaaanaaatccaggatctcactgaattctagaccaanggaacaggcaggngactttnaccaagcgcaagnttggactgatgaagaaggcttatgagctgagcgngctttgtgactgcgacattgncctgatcatnttcaacagngcgcaacgcctnttccagtatgcgagcagcgacatggaccgggtgctgctcaaatacaccgagtacagcgagccgnacgagagccgcaccaacgcggatatccttnagacacttaanaggaggggcgngggccttgatgggcccgagctggatatggaggaggggccagaaggncctggagagaagctgctgaggacactggggggngacagaggctcggcctngcccccgccttggatntatnccgtggcccctgcaatgncggtttcanagctgtcctaccgggtnccaccagccactccaggctgngatcctggcgggctgggggaggccccgtatgt

SEQ ID NO: 884 - DNA, 476 bp, Homo sapiens
  misc_feature (1)...(476): n = A,T,C or G
actgagggcagttcctccagaagtgcagnctctgcgagcntgnnnnctgagctggtcgnanaggctgaggnccgatgccttcgagtgattaatcctgatgtgggctctggcctcagtcacttgctaccaccagccatgtctgcccgcttccgcctggccatgagtctggcccaggcctgcatggacctgggctatcccttggagcttggctatcagaacttcctctatnccagngagcctgaccttcgagatctgcttcttttcttggctgagcgantacccancgatgcctctgaggacgcagaccagnctgcaggtgactcggctattttccttnnggccattgngagccaaatccggnaccagntggccctgccctgggtcncacctgnccttcgaactcccaaggtgcantgnctccagggctnaaccctccngcagccgttccactccagcaggttggttctacctgagat

SEQ ID NO: 885 - DNA, 316 bp, Homo sapiens
  misc_feature (1)...(316): n = A,T,C or G
gactgagggaagctggcacggcggcgcgtggngggcggctcaccgcggnacttcagcactgaaggacatgtccaacacganatctgggaccacttcctctctccaggctagcctgnctagaaactaagtnatagaaactaagggtaaaatacgcatcttcgnatatgnananacatanngntnnaggagatcncnggtncatnttctgagccatcgatggagacacaggcaggctgccatgccatgccaacctggcacttctgtgggttctggggcggggggngaattacgctccttaccggctccagcaccacag

SEQ ID NO: 886 - DNA, 272 bp, Homo sapiens
  misc_feature (1)...(272): n = A,T,C or G
caaaccccgtaccaaggaactagcngagttccaaaccagncagagatacaaagggagaggtgagatcctgtttgaagaaacctccaaacctaagacacacccaaagaaaagcactacccccaccaccatcaacaacaaaatgtttgaatgatctgggccatccagttcctttctggaaccaaaaccagctaatattgatattgacgtttatcacttaacccctctccctgatttcgaaatgaagtctgttccactcagccgaaaaaaaaaaa

SEQ ID NO: 887 - DNA, 103 bp, Homo sapiens
tggtcgacgtctcctctgcactcaaacgcttcctcagggacctgcccgatgggctcttcacgcgtgcgcagcgcctggcctggctggaggaaaaaaaatgaaa

SEQ ID NO: 888 - DNA, 492 bp, Homo sapiens; identical to SEQ ID NO: 34
  misc_feature (1)...(492): n = A,T,C or G

SEQ ID NO: 889 - DNA, 397 bp, Homo sapiens
  misc_feature (1)...(397): n = A,T,C or G
aggcctggcccttctctgggtagcaggnctaggggatactgcccctaaccttccccgncttcggctctcctttcaagaattacaggcccggcatggtgtccgaaccttcaggctggagcggacctgctgttatgaagccttgctggnggatgaggagcgtggacgcctgtttgtgggtgctgagaaccacgtggcttccctcagcctggacaacatcagcaagcgagccaagaaggngccccggacccctaaccttactcagcatcagtgctggctcaggaaaaagccttagggtcccaatccagtctgtctagactccagagaatctccaagtggtgggcaactgaatagagaaacccccaaaataaagagcgccccaaatccctaaaaaaaaaaa

SEQ ID NO: 890 - DNA, 510 bp, Homo sapiens
  misc_feature (1)...(510): n = A,T,C or G
tgaggtccatttcacgtcaacaacggtgccggaggataacagccacctaccagcccagagccgccagagctctctgngatggcaagtggcacacactccaagcccacaaaagcaagcaccgcatcgtcctgactgtggacgggaattccgttagggctgaaagcccccacacccattccacctcggcagacaccaacgatcccatttatgtgggtggctatcctgcccacatcaaacagaactgcctgagcagccgggcctcattccggggctgtgtgaggaacctcaggctgagcaggggctcacaagtgcagtccttggacctgagccgagcctttgacctacaaggagtcttccctcattcctgccccgggcctgagccctaaactgtcgccagcctctgcccttggaatcatcgccaacgcatggaagagagcagtttgtgaactcaagcagctcagctcccattcccatcccattgccatctcaggttatgtttccagaggaaaa

SEQ ID NO: 891 - DNA, 368 bp, Homo sapiens; identical to SEQ ID NO: 35
  misc_feature (1)...(368): n = A,T,C or G

SEQ ID NO: 892 - DNA, 268 bp, Homo sapiens
gactgaggtggggtctttcacgaccaagaccagaagagctgttggaaagctgtggactccgcgccgtcgttcaccacctccacattggtgtagttcgggtaacccttggcctggatgaagccctgggacacagctctgtcaggcctgaggctcaaaggcccttggctgtgctccatccccagagacacccccaaccagtggccacaaggatgcccaagctctgaactgagttaattaaccaaacttgtgacccatttaaaaaaaaaaa

SEQ ID NO: 893 - DNA, 375 bp, Homo sapiens
  misc_feature (1)...(375): n = A,T,C or G
agctagaacaagctcagagtcggatcttgnncctggaaaaccagctggaggagncaggtcgccactgggcacgagagaagcnaaacctggccattcgtcttcaagagcaacaacacggcntttggacagccaccaaactccatcatcatagaccagcctaatgctggagcatccaagaatcgccagcagctctcgaaactggaaacctccctgcccagctcagacaagaagctcaacagaccctcagactctcagattgagatctctaacaaccagaagacctgagaccgggagcagatctccttcgccatgtgctggggattcacgtgcccccaaagacgcctttaataaaagctgtcagtcaataaaaaaaaa

SEQ ID NO: 894 - DNA, 548 bp, Homo sapiens
tgagccctatggggcacccgagtgtgcgctcaggaaccggagttcagctatggctgcgcagaaggcagctgctaccctgccactggcgaccttctcatcggccgagcgcaaaagctctccgtgacttcgacatgtggactgcacaaaccagagccctactgtattgttagccacctgcaggaggacaagaaatgcttcatatgtgactcccgagacccttatcacgagaccctcaaccccgacagccatctcattgagaacgtggtcaccacatttgctccaaaccgccttaagatctggtggcaatcggaaaatggtgtggagaacgtgaccatccaactggacctggaagcagaattccatttcactcatctcatcatgaccttcaagacattccgcccagccgccatgctgatcgagcggtcttctgactttgggaagacttggggcgtgtacagatacttcgcctacgactgtgagagctcgttcccaggcatttcaactggacccatgaagaaagtggatgacatcatctgtgactgggactg

SEQ ID NO: 895 - DNA, 339 bp, Homo sapiens
  misc_feature (1)...(339): n = A,T,C or G
tgaggaatgcctacctgttggttctaataangatgaangtgatgngatcttgnagaagnncatgatncatgcttcggncgcttgctttggcanggaggnttcntnancacaggcatcagagncngtagactcanancngagantgagaaacaccganggcttctgtgacancctccacatttcccacctgggtatgctcttcanagtcgttcacagttgatagcattctgacaggggtggtgnaccccccgaacggagaagatcgaagttaancntgttgggaaaactgatcccnncactgtcttcgngatgaataaaaacatctcaaccccttacagt

SEQ ID NO: 896 - DNA, 227 bp, Homo sapiens
  misc_feature (1)...(227): n = A,T,C or G
ctggttacctcatatacatgttcgcctgatgccatatccnctnncaaccatcgggtaacgnanggactttggagaanccaagcctatgggtacccnctcctggaggctgtncttggggagagcccaggctggcctttccttcagaagtcttaccttctgtgtgtttggcttgatgcatctgacaaagaaaggatttgaggagcttagtgttgccattaaaaaaaaaa

SEQ ID NO: 897 - DNA, 226 bp, Homo sapiens
actgagaattgcttcatcatgagaaatctgaagttgcatcggaccctggagtttcgggacattcaggcaccagggaaacctcagtgtttctgtctgcgagctgagcagggcacggtgctgattggctcagaacgtggactgacggaagtagatcctgtgagaagagaagtgaagactgaaatttctttggtggcagaaggttttcttccagaggatggaagtgcct

SEQ ID NO: 898 - DNA, 541 bp, Homo sapiens
  misc_feature (1)...(541): n = A,T,C or G
tgagagagtgatggtcttcaaaatgaaaactctggaaaattttaggttctctttaggaactacaaaaattgaaggacagcaattttttgaaaggaagttgttctgaaagcatgtttacaattcactgacactgttgactgttctctttaaaataataagacgctttgagaagattgtatttatggtaaaaggaaacntggactaacaatgaggccaaagacttttcctgccacaacttactctggaaatagccggcagcgattgcaagagattcgagaggggctgaagcagccatccaaggcttccacccaggggctgctggtgggaccaaacagtgacacttccctggatgccaaagtcctggggagcaaagatgcctccaggcagcagcaaatgagagccaccccgaagtttggaccttatcaaaaagctctcagggaaatccgatattccctcctgccttttgccaacgagtcaggcacttcggcagctgcagaggtgaaccggcagatgcttcaggagttggtgaatgcgggatgtg

SEQ ID NO: 899 - DNA, 433 bp, Homo sapiens
  misc_feature (1)...(433): n = A,T,C or G
gactgaggtattggacaatcagataaagaaggacctggccgacaaggagagcctggagaacatgatgcagagacacgaggaggaggcccacgagaagggcaagatcctcagcgagcagaaggcggtgggtattaagacaagccgngccatcttcccaggaagaggttatgtacctgcaaggccaagagtcaccccgtttcatctggtgacatggtctctccatgatatcctacgaggtttataggtaccaggaagctttctcgnaaacagcttcctgtcccaaaagaacagggtcggatttataaacccgantggnaaactgaaagctgnaagagcanctggngatgatcanccaccaagatcacagtgacaagagtcggctgctggagctgnaaacaaggctgagggaggtcagcctggagcacgaggagca

SEQ ID NO: 900 - DNA, 112 bp, Homo sapiens
  misc_feature (1)...(112): n = A,T,C or G
cagacgacatcatggacctgttctgtatcgncaccggcctgcctcggnncaccaccatctcccttttaaccacagacgacgccatggtctccatcgatcccaccatgcctgc

SEQ ID NO: 901 - DNA, 343 bp, Homo sapiens
  misc_feature (1)...(343): n = A,T,C or G
actgaggacttggtgacctttgaggntgtggctgtgaacttcacccaggaagagtggactttgctggatccttctcagaagaacctatacattaatgtgatgctggagacctgcagtaaccttgcttctgtgggaatcaaatcagaataccagaccattgaagaccagtataaacagcctgggaaaaatataagactcttgaancaaantagaatgtttccaagaatctcatnctagaagcaanggncgaggaaaaccagaggaggaccttgtntntggnagacttgtctaagtctgttttcccgccatactgtcaagacaagagctgaaggtagggaggtgg

SEQ ID NO: 902 - DNA, 232 bp, Homo sapiens
  misc_feature (1)...(232): n = A,T,C or G
attgagctttgggattctgacatactgtagggcaaatgagacatccagcctagtcgactgaacaactgctgattcttggacgttgggagacagccattgttgaaatagctggaccacagcctggacttcaaaacatgacctgcattacagaagggaagcnggaggntaacaccacactcgaggagttgttactctattttattttcttaataaatctatgcatatgtaagta

SEQ ID NO: 903 - DNA, 420 bp, Homo sapiens
  misc_feature (1)...(420): n = A,T,C or G
cgtcgtgggtcaccacctgcccaggggccctagtncaagctgcctggaacacgctggctccatcaatgaagaggctntccaccccgacgagcccatcatcctctcagcatccagtgacaagaggctgtacatgggtgagatccagtgaagatggggaatggaaggctcccggctcccagccctgaggctcagactgcggaattggccagagtccgatggtgtctgggctgacctgcctcagatgaccatcattancaagcanctggnggtgatggccgtattccaacaaccacttgtaccacactcaccanaacaactgtggcctctgntnccgcctgccagattgcagngatntgctttcttctttttgaaaaataagaatncttnanaaggacaaacattggataagataatttcctg

SEQ ID NO: 904 - DNA, 288 bp, Homo sapiens
  misc_feature (1)...(288): n = A,T,C or G
acagcagtgtgggagtgccatggccttgcatccagaccctgnggatgaagactcgnacgactatnatggngaggagtatgacgcgnnggnncacnaacanggncncggngacatccctacattttatacctatgaagaangactatcccatttaanaccggccagggcatcgccaccctggagagattagatgggacgctttntcagtctgggagcagccaatataatatggcaggcgtccgaacagaagacatcagntacattttatacctatgaagaaggactatc

SEQ ID NO: 905 - DNA, 198 bp, Homo sapiens
  misc_feature (1)...(198): n = A,T,C or G
aaagacaacaagccttctgggtaccaagccttctctncaaacctncaaatacttctntcctcccccaccggccaggagctgcagagcagagctggccgcacgngtncccctgctcccggntctccatctctcctgccancantgccagcttctctcncacacacctcacggactcanacattgaacaaggaggcagca

SEQ ID NO: 906 - DNA, 317 bp, Homo sapiens
  misc_feature (1)...(317): n = A,T,C or G
agctttcgtaaaggantatgaagagctggcntatggcgagtcctgctgccgcttctgtgagaccgcccaggcccaatgaaagagccgtatacgctggtcatncccaagaatgcggccgaggagcagaagctcaagctggagcngctcatgaagaacccgnacaaagcagttccaattccanagaaaatgaatgaatgggctcctcgagcgcctccagaatttgnccgagatgtcatgggttccagtgctgnggctggcagnggagagttccactgtntataggcacctacggcggagagagtaccagcggcaggaga

SEQ ID NO: 907 - DNA, 146 bp, Homo sapiens
  misc_feature (1)...(146): n = A,T,C or G
ttgcctctactacctgtccgctctgaaattggaacacttggctctcatctacttcggaggcctgtctggctcctttctctacacaggaggaatngaatgcaagtntgagggcctgacngaccatggtnatcctcataacttacgga

SEQ ID NO: 908 - DNA, 256 bp, Homo sapiens
gactgaggaattacacagtcgacaaaaaaagccatttttcttgggagctgaacaaaggctgaaggactggcataacaaggaggctatcaggagggacgcacagcgcgtaggatatggagaacaggggaagccttaccccatgaccgatgccgagagagtggaccaggcgtaccgggaaaatggatttaacatctacgtcagtgataaaatctccctgaatcgctctctccccgatatccggcacccaaagtgagtg

SEQ ID NO: 909 - DNA, 480 bp, Homo sapiens
gactgagggcttggctatgtcgcctttcgggagcctgtttccttacccctacacatacatggctgcagcagctgcagcctccaccgcggccgcctccagctccgtgcaccgccacccgttcctcaatttgaacagcatgcgccccaggctgcgttacagcccctattccatccccgtcccagtgccggatagcagcagtttgctggccacagctttaccatcaatggcttccgccgcggggcccctagacggcaaagcggccgccctggcagccagcccagcctcggtggctgtggactcggggtcggaactgaacagccgctcgtccacgctgtcctctggctcagtgtccttgtcacccaaactctgctccgagaaggagacggctaccagcgaactgcagagtatccagcggctggtcagtggcttggaagccaagccagacaggtcttgcagcgggtccccttaaaaacaagaaaa

SEQ ID NO: 910 - DNA, 520 bp, Homo sapiens
ttgagccacgcgttgaagtgtttgaatgcagtggtatagaggactgctacaagcctaagacttgctccagccagagcctctactgcttgaccaactggtatacaccgccaggtcagcaaacgactgtgacaaaaacatgtgcatatacctgccctgacattaatcatgtcacagccaactccaagtcctcctgctgcaacacggacctctgcaatagtgccaggaacctccacgtcagttggggattgctggcccttggcctctgctatatctatctcagccagtaggtgccgagctcccacaggggctcacaagctgcagagttaagagttggagtttggtgccatcatgcaaccggaatgtgtagccatgggtggggcacttcttgaactccaatcagaaggattccaagaggcaacctcacagatgtggctgatagagaccgtggcccctgtccagagtgctgcattcagaactcttgtctgagaggcatgtggattttctgagttcgaggccaagg

SEQ ID NO: 911 - DNA, 193 bp, Homo sapiens
gactgagcgatacaactgcctaaactcagggttactgccgtggcagctgctgggatcctggagagagttcttctcaccactgcaatctgtgctttgtatctgcctttgtaaacacagaggaatagtgcaaccctgccatggacagcatgccctgaatagcttcttcctctgtgctcgtcgagaaagaaaaaaa

SEQ ID NO: 912 - DNA, 467 bp, Homo sapiens
  misc_feature (1)...(467): n = A,T,C or G
gagctgatgactggtcaggtntggnctacatccagggacaggangcccgntgnggnnannaacacgaagccnntntgnacaggannactncaanctctcacttcctcancacaccttcccgnnntcnncatcatggggctgattccttgcctccaaaccttcctgtaaaatnacaggagaccctgcagttctnctggcagtcccgatggcttcctccacgctttggatcttccatccacaagaggactggcaccctaccggatactagccttttcctgggggggaggggacggacacacagtctaaactgactctcaccttcactgggaaaatatccaaggaatcttccggtcctttcagattcatatagggcgagaagctgctggggcaggaccgcctcttctccagaagctccgncttaatctcctctcttnccaccagatgttccctgggtagaacaacaatgg

SEQ ID NO: 913 - DNA, 284 bp, Homo sapiens
  misc_feature (1)...(284): n = A,T,C or G
ctcttggggcattggtgaacctcagtaatgcacatcttggctccatcaaaactcggtttgaaggcctgtgtctgctgtccttgttgataggggagagccccacagagttattccagcaacattgtgtttcttggcttnggagcatccagtaggtgctgcaggttcttctgaattttccagaaagtcctgaaacccctgagttccagggtgggtgtatatcaaactnggagagatgaggcagagaaatgcagtatgggagaataaagattattgtaatctcctaa

SEQ ID NO: 914 - DNA, 183 bp, Homo sapiens
  misc_feature (1)...(183): n = A,T,C or G
ttttggtcggcaggtgntngcaccaggaatcacccacaggcctgctgtggccaagtccgtagacacagcatcggaagaacaagggggtggtcggagctaattccctggtgctggatccagtttttcttcctgagaggccaaagctaggatgggagtctcatctccaccattgaaaaaaaaaaa

SEQ ID NO: 915 - DNA, 374 bp, Homo sapiens
gcctgtccctgagaccgtcagatcggccctcctttgaagaaatccggaaccatccgtggatgcagggtgacctcctgccccaggcagcttctgagatccatctgcacagtctgtcaccgggatccagcaagtagcagcctttctgctgctgtctgtcagaccctccagggagggagagcttgtcttctggcctccaacaggaccctgcgtgacgatgcagggacagcaatgacaactcattccagactccaggtccctggaggagcctcccacaagggaaagagactacttcactggtcctgggcccctctttgcgcgccccgcccccagactcagcgtctagtgttgctgggctcccctgaatccatccctgg

SEQ ID NO: 916 - DNA, 334 bp, Homo sapiens
gactgaggcctgtattgatgaaaatttggacatggtgaagtttctggtggagaacagagccaatgtaaaccagcaggacaacgagggctggacacccctgcatgcagcagcttcctgtggttatctcaacatagcagagtattttattagccatggagccagtgtgggtattgtgaacagtgaaggtgaagttccttctgaccttgcagaggagccagccatgaaagaccttcttctggaacaagtaaagaaacaaggcgttgatctagagcagtcaaggaaggaggaagaacagcagatgttgcaggatgcccgccagtggctcaacagcgga

SEQ ID NO: 917 - DNA, 357 bp, Homo sapiens
  misc_feature (1)...(357): n = A,T,C or G
actgagataattagcaccatggagcctcaggtgtcaaatggaccgacatccaatacaagcaatggaccctccagcaacaacagaaactgtccttctcccatgcagacaggcgccgccacagatgacagcaaaaccaacctcatcgtcaacatatttaccccagaatatgacccaagaggaattcaggagtctctttgggagcattggtgaaatagaatcctgcaaactcgtgagagacaaaatcacaggacagagtttagggtatggatttgttaactatattgatccaaaggatgcanagaaagccatcancactttanatggactcagactccagaccaaaaccataaaggtgcc

SEQ ID NO: 918 - DNA, 172 bp, Homo sapiens
  misc_feature (1)...(172): n = A,T,C or G
gactgagatgaacacantgatgtacagaagtaaacctttaccaaatggataaacgctcgattttccaagagtgggaaaccacccatcagtgatatgntctcttagtttcactacgtgtacagagcagagacgatgacccggagtggaagttggtagaccaaattaaaaaaaa

SEQ ID NO: 919 - DNA, 235 bp, Homo sapiens
  misc_feature (1)...(235): n = A,T,C or G
gaccaggtcaggacanggngtctntgttgatgtgggcacaantcttcaaaccagtggntgtaatctcaacagccgncacgncttncatgtggtgcctccaccttggaaaagcaacaacagtgcatggncactaaagatcatgaaaaacatcatccgngactgcctgaanaccaccgagaacctgtctctacaatcgattgcattntcagcnatnggaacggcaaattcgaggctt

SEQ ID NO: 920 - DNA, 469 bp, Homo sapiens; identical to SEQ ID NO: 36
  misc_feature (1)...(469): n = A,T,C or G

SEQ ID NO: 921 - DNA, 454 bp, Homo sapiens
  misc_feature (1)...(454): n = A,T,C or G
actgagctgcagcaatacccgcgtctgcgggnggagcatggagcgaattgtgaccacccacatccgggaacgtgagggccgcaccaaggagcaggtcatgcttctcatcgacattgagctggcttacatgaataccaaccacgaagacttcataggctttgccaatgctcagcagagaagcaaccagatgaacaagaagaagacttcagggaaccaggatgagattctggtcattcgaaaggggtggttgaccatcaacaacatcggcatcatgaagggaggctccaaggagtactggtttgtgctgactgctgagaatctgtcctggtacaaggatgatgaggagaaagagaagaagtacatgctgtctgtggacaatctgaagctgcgtgatgtggagaagggcttcatgtcaagcaagcatatttttgccctcttcaacagacataaaaaa

SEQ ID NO: 922 - DNA, 378 bp, Homo sapiens
  misc_feature (1)...(378): n = A,T,C or G
ccagctgtctctcctanccaggaaatgntggagctnggactcattcagaaangatcggacccangacagncngcgctgatgcangctnccnccaccccntcttccnnncatgngcgtcaaccctgcccttgtagggaccactcgcttctgagcgttngtagcggacctatganangagagttnngcagnctattttgaccacattnggcaaaaaacactaacnggttgctacaccccctgagggcagcgtgacggcagcatcatgaatgagacggacttggcagggccagtggtgttctgccttgcctttggggccacactgttactggctggcaaaatccagtttggctacgtatacgggatcagtgcgattggatg

SEQ ID NO: 923 - DNA, 256 bp, Homo sapiens
  misc_feature (1)...(256): n = A,T,C or G
gtagaccgtactttcaccacaatgagctncagccccttcaggaacagctcgctgtacgccgtcacccttctacacttgaccagactggcgctctccacctgccccgccgccgccttcgcttctcaccatgtgtaaggcggcgggnagccccgcctgagctgnccctccctgctcacacttgctcagatgctgnagtgcaggggcttcagcattcttgagttcctccgtgttaataaaaacatcctgtgacagttaa

SEQ ID NO: 924 - DNA, 368 bp, Homo sapiens
  misc_feature (1)...(368): n = A,T,C or G
gactgagggctaagtncttgtgatatgtcgaagcagccaatttccaacgtcagagccatccaggcgaatatcaatattccaatgggagcctttcgtccgggagctgggcagcctcccagaaggaaagagagtactcctgaaactgaggagggagctcctaccacctcagaggaaaagaagccaattcctggaatgaagaaatttccaggacctgttgtcaacttgtctgagatccaaaatgttaaaagtgaactgaaatttgtccccaaaggtgaacagtagtcgaaaggacacaaaagcgttgacgtgtttttccaagggagaaaaaacaatgggttgaaataaacaacttcctgaacattttaaaa

SEQ ID NO: 925 - DNA, 528 bp, Homo sapiens
  misc_feature (1)...(528): n = A,T,C or G
gactgagtgttccccggacactgggccccaagtagcccctgggcagccagagaacaacttctccaaccccaaagcaagcatctgctactgctcctggccgagagagcccccgagagacaagggcccaaggcccatcaggccaggaggccgaaagtccccgcaggacgctgcagattgaccntnttacnangagancnctgngnccaatatgcgagacctcggacctcacatcaacctcccagccagccaatacttctgcacctgcnntccgagngtcatnaccaaggtctgcnangcaatgngnnttcaannccnaccctcncctancccanaggantgnggnncagttcctagcanncacagagtggctcacaatgntctgtattccatgcnnagnnnctccaatgccttctcnacccaggatgnanngagacntgcntgnaggannanaacnatncttatacatatnaatacttttaacctgnngngctccaatgccctctccacccaggatgcacagagacatat

SEQ ID NO: 926 - DNA, 385 bp, Homo sapiens
  misc_feature (1)...(385): n = A,T,C or G
tgtcatgggccagaacttaattttgaacatgantgatcatggattngnggnctgtgctttcantnggacagtctccaaagtcgatgacttcttggccaacgaggcgaagggcaccaaggtggttggtgcacagtccttaaaggacatggtctccaaactaaagaagccccgccgggtcatcctgcttgtgaaggccgggcaagccgtggatgatttcatcgagaaattagtaaggccagctcggttctcggatgccgcccgcaaatccctctaactgtctcacttctgagatggtggtcttcagtgtctgagtacagactgatgggttctgataaagtgcttgagtgtttcaggcttggttgccttgacaggcacttatggaaaa

SEQ ID NO: 927 - DNA, 511 bp, Homo sapiens
  misc_feature (1)...(511): n = A,T,C or G
gactgagcgcattggtgaggactacatctcagancctggaccagctgcgcaagctgctctcctatgtggatgatgaagcctttatccgtgatgtggccaaagtgaaacaggaaaacaagttgaagttctctgcatacctcgagagggaatacaaagtccacatcaaccccaacatcgcgtctttgacgtccaggtgaaaaggattcatgagtacaagcggcagcctcctcaactgcctgcacatcatcaccttgtataaccgcatcaaaagggagcccaataggtttatggngccgaggactatcatgattggaggcaaggctgcacccgggtaccacatggctaagatgatcatcaagcttatcactgccattggggatgtggtcaaccacgaccctgcggtaggagaccgcctccgagtgatcttcctggagaactaccgagtctcccttgctgagaaagttattcccgccgccgacctctcagagcagatctccaccgcgggcaccga

SEQ ID NO: 928 - DNA, 513 bp, Homo sapiens
  misc_feature (1)...(513): n = A,T,C or G
actgagccgggttcccggccgggtcaatggctggccaagctcccacagcggttcccggcagtgttactggagaagtctcacgatggcagaacctangacctgcccagcctgcacagaaagtagcccagccccaaaacctggttccagatgggcaccttgagaaagccctggagggaagtgaccttctacagaagttgggtggctttcacatcgccattgcttttgcacacttggcctttggtggctacttgatctccacagtcaagaatctgcacctggtggtgttgaagtgctggtatccactctggggaactgtctnttttctcgttgcagggatggnggccatgacaacagtgacattccctaagacctctctgaaggttctctgtgtgatagccaacgttatcagcttgttctgcgcactggccggcttctttgtcattgccaaggacctcttcctggagggtcctttttcatggccaatctggagaccataccctgaacccacaacct

SEQ ID NO: 929 - DNA, 445 bp, Homo sapiens
  misc_feature (1)...(445): n = A,T,C or G
aaactgtgggaaacaagagtccacacataacattttcggaaagtacacagaaaacaaaggtctctgaaggctgtaacagagaaggctgtagacgatctcctccctaagtcggcttccacacaagagctggcagtgctgaacacccgccgcaactctcaccccgtgggaaccttacttacattgtaggtctccagcttgaccctgattctgaacgtaaatgaccggaagttggcattctggaaaacctcttcaaacgcctgctcgttctgcaaaaaacaagacatgggaactactggaaaacacccattagactgctgaagagactgagnntattgtcatcttgaagggttgaaatcactgaggaatggctaatgacaaaactgcttaaggagaattttattaaaaaacaaaactccttctggaggagtactgtgaaaaaaaaaaa

SEQ ID NO: 930 - DNA, 393 bp, Homo sapiens
  misc_feature (1)...(393): n = A,T,C or G
tgaggccccgctgtggaggtggccctgtgtcgagcggttctagagcccctgaagcccgncctgtggaccaaactccgaactctcagagcccaggaactacagacgactgctgcaggccgccaaatagccttgagggtaggagcggngcctgagggacagagcccggccttgcggaaccaggaaccgtatccacgcacgccttgctcacttgcatgccggngtgcgccccgcgccgcaaggtggcgctgttgctggcggtgtgcagcgacgtctacgcgggcctaggcggtggcgagaataaagagccnntgngggttgacnnctttttacctgacctgaccgaggagntgatctggagtccanatattggggaaacatagcgtggatgtggag

SEQ ID NO: 931 - DNA, 375 bp, Homo sapiens
  misc_feature (1)...(375): n = A,T,C or G
tgagacagacggagctggtncgnactcaggttgcctttacgnagacatcgntgccgggtcangagttacnagcattgctncactgcatcggaggctgnggactggctgcncagagcttctgcggaacagtcaaaactttggnccctaggtancctctcaancaancagtccanctgntgggaaaattcctgaagaatcatgttattgaggacatcaaggggaagtggggccaggaggattttgaagacaaccggcacctctacaggtaatggcagggtgtaaactctgaagaaggaacacggggcaagtgagtgcatcgggccagcatctggaaacttcccgaagtgaaagaatttgctgtgtccactgaagcag

SEQ ID NO: 932 - DNA, 352 bp, Homo sapiens
gctgagggcaccgttctttatcaacaagacaaagattaaagactttcctcgattccctcaccggggcgtactgctggatacatctcgccattacctgccattgtctagcatcctggatacactggatgtcatggcatacaataaattcaacgtgttccactggcacttggtggacgactcttccttcccatatgagagcttcactttcccagagctcaccagaaaggggtccttcaaccctgtcactcacatctacacagcacaggatgtgaaggaggtcattgaatacgcaaggcttcggggtatccgtgtgctggcagaatttgacactcctggccacactttgtcctgg

SEQ ID NO: 933 - DNA, 197 bp, Homo sapiens; identical to SEQ ID NO: 37

SEQ ID NO: 934 - DNA, 180 bp, Homo sapiens
gactgagctgaagcctgtagtcgatatattcatgacttattcccttcactcatcaagaatctggatcctgtgccacttagacatttacttaatctggtctcagctcttgaaccaggtgttcatactgaacagacactgtacttggcatccatgttaattaaagctttgtggaataatgca

SEQ ID NO: 935 - DNA, 372 bp, Homo sapiens
  misc_feature (1)...(372): n = A,T,C or G
agtgaacacatcgtttgctgcctgtgcgcgggctacttcgtggatgccaccaccatcacagagtgtctccacaccttctgcaaaagttgtatcgtgaagnacctgcaaaccagcaagtactgccccatgtgcaacatcaagatccacgagacgcagccgttgctcaatctcaaactggatcgggtcatgcaggacatagtgtataagctagtgccaggcttgcaagacagtgaagagaaacggattcgggaattctatcagtcccgaggcttagacagagtctcccagcccagtggtgaagagccagccctgagcaaccttggcctccccttcagcagttttgaccactctaaagcccactattatcgatat

SEQ ID NO: 936 - DNA, 300 bp, Homo sapiens
  misc_feature (1)...(300): n = A,T,C or G
tatgtagcatgcagtgacaacagcattgccccatcaattgncacnatgggcctcggngccacagaatatagaggaagcncccaagttgctggcctttacctgcngccttctgtgcggggcnctccatacactgnnctnncagagcctggncaccgcctgcgnggcatccntgcccgtctgtaagntccaggtgntnaacnnganttccngaggnccccanaccccaggcgttgcccttctgtaagcttagcctcggaatgtggcacctgacnctgcctgactgctcacctttgcaggtcg

SEQ ID NO: 937 - DNA, 335 bp, Homo sapiens
  misc_feature (1)...(335): n = A,T,C or G
catggggatgacaggancccctgntgctgtccatgagnannctnncgctggagaggctgacnttgaccncagaggctctggaccantctttatagcttcctctatgagatcancacttgantggcacagcccttgcnnccattanaagntngaatnggtgatggatgactnnggccntgnacngacgaagagacacagacatcagaagatcctgcccnctgcgtcggaaggaaggcncnagtttcttngancanagagaacnaggcttggactggaagattttgagtctttaaaagtcntangccgaggagcatttggngaggtaaaaaaaaaaa

SEQ ID NO: 938 - DNA, 213 bp, Homo sapiens
  misc_feature (1)...(213): n = A,T,C or G
gactgaggtagagcanatcctggcggngttccagctgcgggaggaagacctgaagaaggngatgagccggatgcaganggagatggaccgtggcctgannctggagacccatcacggaggccagtgtaaagatgttgcccacctacntgcgttccaccccagaaggctcanaagttggagactttntctccttagacctgggaaaaaaaaaaa

SEQ ID NO: 939 - DNA, 376 bp, Homo sapiens
  misc_feature (1)...(376): n = A,T,C or G
actgaggttaaatgtatctttagaatacagtatgaagaggtattatatattcaaagacctattgaagaagatcgaagaaaatttttccaagaacttattctccatcaggcgtcaatggcaccaccacgaaggaaacatactgctcttcgtgctatggaagtgcttccgcttgcactaccatcacctcctcgtcagttatcagaatcagaaaaaaatcggatggaagaccaggaggaaaatacgttacgagagttgcggttgttcctcagggacgttaccaagaggctggccacagataaacgctttaacatcttcagcaaaccggtggatattgaagaggncttgtttcagtagtgtgcaaacagtgaagttgaac

SEQ ID NO: 940 - DNA, 387 bp, Homo sapiens
  misc_feature (1)...(387): n = A,T,C or G
agatttgccaaagaggattcccaaggattcagcgcgttaccatttctttctgtacaagcattcccacgaaggagactacttagagtccgtagtttttatttattcgatgcctggatacacgtgcagcataagagagcngatgctgtattccagctgcaagagccctctgctcnagattgtagagcgacagctacagatggatgtgatcagaaagattgagatagacaatggggatgagctgactgcggatttcctgtncgatgaanttcaccccaggcagcatgcacataagcagagttttgctaaaccgaaaggancctgcgnccaangaggngnatccgangattgatctaggngcccagtgcnaccagaagccactactgacta

SEQ ID NO: 941 - DNA, 477 bp, Homo sapiens
  misc_feature (1)...(477): n = A,T,C or G
gggtaccgctgacatgnccactggcaaagacaancccatatatccttcggcgaacaaccatggnaaccaggaccagcccccgctttgctacacagaagttagtgggatcttccccatctctgggcaaagaaaatgttgtagagtcctccaaaccaacagctggtggcagcagatcacaaaaggtcaaggttgttcaggagagctcagcnggatncacacactgccttccaagaactcccagcaaaatctctcacagccagtaatattcctgggagaaactctacagagagccccagggagggcctgagggccaagccgggcctaccctgcctccagcccagctgctgggcctgatcccncnaacaacgaaaactgncgggnnccagtgaagntgtncactcagnnnatctggnaggtggcattctcaaaggagcctgcctgtgggnacttgaacttgagccaaggacacattatgta

SEQ ID NO: 942 - DNA, 117 bp, Homo sapiens
  misc_feature (1)...(117): n = A,T,C or G
gcatgtggcagtcagctaacctcacacctcaaccccttgnctatgaccacaagctggaaggcttcttcgctcagaaattacctgacctagagacggtgatcaagaacccctgtctca

SEQ ID NO: 943 - DNA, 525 bp, Homo sapiens
gactgagaggagaagatccgggagagtttgtggaagccttgaagacagagtttgctggcaaggggctgcggttctcccgaggaggcatgataagcttcgatgtcttccccgagggctgggataagcgctactgcctggacagcctggatgaagacagctttgacatcatccacttctttggaaatgagaccagtcctggcgggaatgactttgagatctatgcggacccccggactgtcggccatagcgtggtctcccctcaggacactgtacagcgatgccgtgagctcttcttcccagagacagcccacgaggcgtgactgggcccacagctgagcactgggaccttcaaagagctctgaccaggcctgaagatagaaccattgggtgccacggttcccatcccactggcccaacacgtagcatcctgtgggggcactgcagggtcacccacacaggaccaacgtctgtgtgggaactgtccccagccaggtggctcctgacgagacgcatacctgctctcta

SEQ ID NO: 944 - DNA, 293 bp, Homo sapiens
gactgagaatatgtgctgtgtctcgaactctaagaaagaaattggccgctgttttaaactgattttgaaagctctggaaaccagcgtggatctgatcacaactggggacttcatgtccaggttctgctccaacctttgcctccccaagcaagtgcagatggcagctacacacatagcccgcaaggcagtggagctggacttggttcctggcaggagcccgatctctgtggcggcagcagctatttacatggcttcccaggcttcagctgagaagcgaacacagaaagaaatcg

SEQ ID NO: 945 - DNA, 273 bp, Homo sapiens
  misc_feature (1)...(273): n = A,T,C or G
cagaaggaggagatgggcatttcctgtgagctgctggaatcagacttcctcaagtgcagtgtgggatttcctttcatgaggtcaaagtctaagtatgaattcagngtcatctttgatacaagccacctgtctggggaagaggaaattctcagcttcatngngactgctcagagtggnaacttggancgctctgaagccctgcntgacaacactctcacactgacagtgccccntngtgcatgaagtggacacgttccatcactggaattgtgt

SEQ ID NO: 946 - DNA, 501 bp, Homo sapiens
  misc_feature (1)...(501): n = A,T,C or G
tcctttcggcaacaaccccatacttccgctacctcttcggctggatggtgcctcccaagatctccctcctgaagctgacccagggcgagacgctacgcaagctgtactgagcagcaccacgtggtgcaggacatgctggtgcccatgaagtgcatgtcacaggccctgcataccttccaaaatgacatccacgtctaccccatctggctgtgcccattcatcctgcccagccagccaggactagtgcatcccaagggagatgaagcagagctctacgtggacatcggggcatacggggagccacgtgtgaagcacttngaggccaggtcctgcatgaggcagctggagaagtttgtgcggagtgtgcacgggttncaaatgttatacgccgattgctatatgaaccgngaggaattctgggagatgttcgatggctccttgntccacaagctgcgcaagcagttgggctgccaggacagnctttcctgaggtgtacgacat

SEQ ID NO: 947 - DNA, 208 bp, Homo sapiens
  misc_feature (1)...(208): n = A,T,C or G
actgaggactgcagcatccgagnncaaaatagacttagagatccgcatgcgagaaggaatatggaagctgctctcgctgagtacgaaaaaagaccaagttttgcatgcagttaagaacctcatggtgtgcagtgctcggatccaggcgtacacggcggagcctgcagaagtcaaaagaagagattgcaaatcaaaccggagcacgggt

SEQ ID NO: 948 - DNA, 256 bp, Homo sapiens
  misc_feature (1)...(256): n = A,T,C or G
aactgagtttatcagagaagatatgaaatataaagatgctacgaataaacatagtcacctgcacagagaagataagcacataactgttgaggatttgtggaaacagtggaaaacatcagaaggtaanactgngcngctgctctggagccttggcttgtctgcttctgccctgcttggnnttggcagccctactaattgcatataattatagagaagatnatgcttcatgtgagaatatttatatttaaaaaaaaaa

SEQ ID NO: 949 - DNA, 497 bp, Homo sapiens
  misc_feature (1)...(497): n = A,T,C or G
agatgtggtgcagacccaatngatgggaacaggctccagagcctctcagcatcccagcctgcactgctccttactgcacttgaacaacacgttttgtatttacagccttttttagcanaacttcagtctttaatgaaagaaaactcaacagctacagagatangacagacagaagcagagaccaagagtgaactaagagccatacatcccaccgaggacctacaagatgaagggaagcccaaagactgtgatgtnggagatgtgaaaaagacacaaaacctttttgacccagaagtagnncagatcaaggctggaaaagcagaaattgacagacgaatatctgcatttattgagagaaaacaagctgaaatcaatgaaaacaatgtcaggnaattttgnaatgctattgattgtaatcaagaaaatagtttgtgcnagaactgatgctgtcttttactccttatcctggatttaaaagtcntgtaaagggtttctag

SEQ ID NO: 950 - DNA, 199 bp, Homo sapiens
  misc_feature (1)...(199): n = A,T,C or G
ggagttccattgtgactggaagtctngcaggcatggtttncacgattgtcacataccctacagacctcatcaaaacccgattgatggtgcagaacgtgctggaaccatcatacagggggctaatccatgctttttctactatntatcaacangaaggggtcctggccctntatcagaggggnctcccctcagtgtttta

SEQ ID NO: 951 - DNA, 417 bp, Homo sapiens
  misc_feature (1)...(417): n = A,T,C or G
ggacacgcacaaggacntgtagaaagcatggtagagcttttggacttgtatcagatggaggatgaagcctacagcagccttgcagaggccacaactgaactctaccagtatttacttcagccattccgagacatgcgagaactggccatgctacgaagacagcagatcaagatttccatggagaatgattatttgggccctcgaagaattgagagtctacagaaagaagatgcntgactggcagcggaaagctcacatggctgttttgtctattcaggatctcaccgtcaaatattttgaaataacagcaaaagctcagaaagcctttccctaacaggattttgctttgtatttattgaagagcaaagaaacatgatatgagaaagaaataaaggattctattctacaaaaaaaaaa

SEQ ID NO: 952 - DNA, 288 bp, Homo sapiens; identical to SEQ ID NO: 38
  misc_feature (1)...(288): n = A,T,C or G

SEQ ID NO: 953 - DNA, 295 bp, Homo sapiens
tgcaacacccaacacatataagaggaagaacacagaaacagctttggacaacaagccttgtggaccacagtgttaccagcatctggagggagctaaggagtttgctgctgctcttactgctgagcgtataaagacaccacctaaacgcccagggggcccgcagaagaggaagacttccgaataacagtagcagacccagcacccccaccatcagtgtgctggagtcaaaggatacagacagtgacagagaagcagggactgaaactgggggagagaacaatgataaagaaaaaaa

SEQ ID NO: 954 - DNA, 123 bp, Homo sapiens
actgaggattgcctgaactagaattaggaagcgatcgataaccagtttggacaaccaggagcagggggatcagattccatgggcaaataatactttgacaacaataaatcagaataaaccaga

SEQ ID NO: 955 - DNA, 390 bp, Homo sapiens
  misc_feature (1)...(390): n = A,T,C or G
aggttggcaaactgtatgtttgggatttagaagtagaagatcctcataaagccaaatgcacaacactgacccatcataaatgtggcgcggctattcgacaaaccagtttcagtagggatagcagcatcctcatagctgtctgcgatgatgccagcatttggcgatgggatcgacttcgataaactattttttcctagcaaaaattagtctgttgtctgnaaaatagaagtaatgtatcttgctagtaagggcacatagagcatttagacttgtttttcagcattcgatcaggctgagctgaatgtagccgangttcacattgtttacattctttgtactgtcttcctgctcggactttactgcttttaataaaaatttatttttgtaaaa

SEQ ID NO: 956 - DNA, 472 bp, Homo sapiens
  misc_feature (1)...(472): n = A,T,C or G
cctgtgtgtgaggagtcggcctgagcacttccaggacgccacaaaaccttttctacgtttcgggcttcatttcacagtgcacgcacggccgccgggaggagtgcaacagacaggcagtttttcttcatcaatcagaggccctgtgacccagcaaaggtctctaagcttgtcaatgaggtttatcacatgtataaccggcatcagtacccatttgtcgtccttaacgtttccgttgactcagaccccagactctgaacttaactgctgtcaatgaagctgtactgatagaaaatctggaaatattcagaaagaatggctttgactttgtcattgatgaggatgctccagtcactgaaagggctaaattgatttccttaccaactagtaaaaactggacctttggaccccaagatatagatgaactgatctttatgctaagngacagccctggggtnatgtgccggccctcacg

SEQ ID NO: 957 - DNA, 519 bp, Homo sapiens
  misc_feature (1)...(519): n = A,T,C or G
ctgagtttttcgtaatnagctaccaaggaacaacgcattctactcctatgagcccccttctgaaacagaagctttgggtacggaatgtgtgtgcctccagctcaagtctggagcccatctctgtcgggtttgtggttgcttggcccctatgacatgctctaggtgcaaacaggcacattactgcagcaaggagcatcagacattagactggcggctgggacacaagcaggcttgtacacagtcagacaaaatagaccatatggttccagaccacaacttcctgtttccagaatttgaaattgtaacagaaacagaagatgaaattttgcctgaggttgtggaaatggaggattattctgaagttacaggaagcatggggggaattcctgaggaagaactagattccatggcaaagcacgaatccaaggaagatcacatattccaaaagtttaaatctaaaatagcccttgaaccagagcagattctcaggtatggaagagggattaaacccatctggca

SEQ ID NO: 958 - DNA, 526 bp, Homo sapiens
  misc_feature (1)...(526): n = A,T,C or G
gactgaggtactgcagggtgctcagctcatagccgnggcctcttcagaccctgctgctacaggagtagatgggtcgcctctccagggcagngacattcaggttcagtatgtccagctggcgcctgtgagtgaccacacagccgcagcgcagaccgcagaggccctgcagcccacatctgcagccctgacatgcagcgttgaacatggggccatccagatccagtgaggccaggcactgcaggagcaccgagtcacagctgctcgctgaccctgccccactcgtgccctgctctcttgatttcagcaagcaactgcaggttctgctgggcatctgagagctgctcctcccaggggaaggtcctggccacccctgctggaaggcgcctcagggttggagtctcactactggtcgtctncaaaggagaagcatagtgcagagngttgagtgcattcagacagacaagaactacgatattttgtttaaacagcttttttaatttgctatggtgtttataacaaaaaagat

SEQ ID NO: 959 - DNA, 482 bp, Homo sapiens
  misc_feature (1)...(482): n = A,T,C or G
gactgagaagagtaanaatgacatangnaaactcatcttcaaaagngngtgactnncaatatgntcccatacaccgatgtncncaagaatcctnnctngcaagagnggggncgagaagccattgaaatgcacgagancaggaagcaccaaanacctcctgcagangacagacgngnacatactcgcccacaatctgtaaggaactcctgaacatnnaacgcatcagnactgtacccagcctacantgaacatgcaccgcgattagagacanctcttgcattttncngagcacagnatanccnatctttcatnanngacnagagcaggaggagagactacttgtgagtccangagacagaggtgaggccccctgtttctntgagccacttccccggacatntggctcagagcactacacccccaaaagggagcaccatgcactagctgntcctggtactccgtagagccacgcttgaggggcg

SEQ ID NO: 960 - DNA, 244 bp, Homo sapiens
  misc_feature (1)...(244): n = A,T,C or G
ggtacctgctcaggcncacctcgtgatccgngaagactgccgagggaacattctgattcnaggcctgacacagaagcccatcaccagcttctctgacttcgagcagnacttccttccagccagtagaaatcgagctgtaggagccacccggcttaaccagcgctnttcccgtagnnacgcagngctctagnccaaggnnnatcagcgtgaacgtttgantccatcncggcagtgggaaggaaca

SEQ ID NO: 961 - DNA, 499 bp, Homo sapiens
  misc_feature (1)...(499): n = A,T,C or G
tgagcatctgaagaggatgtgagtcagtttgattcaaagtttacacgtcagacacctgttgacagccctgatgactccactctcagtgaaagtgccaaccaggtctttctgggttttacatatgtggctccatctgtacttgaaagtgtgaaagaaaagttttcatttgaaccaaaaatccgatctcctagaagatttattggtagtccacgaacacctgtcagcccagtcaaattctctcctggggatttctggggacgaggtgcttcagccagcacggcaaatcctcagacccctgtggaatacccaatggaaacaagtgggatagagcagatggatgtgacagtgagcggggaagcatcagcgccacttncaatccgacaacccaactccgggccgtacaaaaaacaagcttttcctatgatctccaaacggccanagcacctgcnggatgaatctatgatgaaacaatgcttttattaatgcaaaatcatatagg

SEQ ID NO: 962 - DNA, 451 bp, Homo sapiens
gactgaggttatttgtatctaccccgcttatttaaataataagaagaccatagctgaggggagacggatccctataagtaaggctgtagaaaaccctacagctactgagattcaagatgtatgctcagcagttggactgaatgcctttctggagaaaaacaaaatgtactccagagaatggaaccgtgatgttcagtttctaggcagagtccgggtacagctcaaacaggaagatggcagcctctgtcttgtacagttcccgtcacgtaagtcagtgatgctatatgtagcagaaatgatacccaagctaaaaacacggacacagaaatcaggaggtgccgacccaagtcttcagcaaggagaggggagtaaaaaagggaaaggaaagaagaagaaatgacgtggtgtgaacgtggagcacagtcctgctgggagagacatggcatccttg

SEQ ID NO: 963 - DNA, 381 bp, Homo sapiens
  misc_feature (1)...(381): n = A,T,C or G
gtttgagcttcctgttgagcganttatgaacctttctacaagggtgggaaagcacagctggaccagactggccattacctcttctgtgtctgtggtaccaaagttaacatcctggatgtggcctcaggggctttgcttcggagcctggagcaggaggaccaagaggatacacacagctnctgtggcctccatggcttttgatgccacctntacactgttagccacaggcggctgtgatggggctgnacgtgtttgggagcaggacactgcaagcagccaccttcttggacttcctgtggcacaacatgaagctgtccccatgccctgctgcagctcccccagccctatgaaacagaaaagttaactttctaaaaaaaaaaa

SEQ ID NO: 964 - DNA, 546 bp, Homo sapiens
gtttgagagacagtggagatcctgttgttcctcagtgccattgtgatgatgaagaaccgcagatccatcactgtggagcaacatgtaggcaacatctttatgtttagtaaagtggccaacgccatccttttcttccgactggatattcgaatgggtctgctatacctcacactctgcatagtgttcctgatgacctgcaagcccccgctgtacatgggtcctgagtatatcaagtacttcaatgataaaaccattgatgaggagctggagcgagacaagagggtcaccttggattgtggagttctttgccaactggtctaatgattgccaatcctttgctcccatctatgcggacttgtccctcaagtacaactgttcagggctaaattttgggaaggtagatgttggacgctacactgacgttagcacacggtacaaagtgagcacatcacccctcaccagacagctccctaccctgattctgttccaaggcggcaaggaggtcattcgtcggatcgtagattgacaagaaaggacgagctgtct

SEQ ID NO: 965 - DNA, 405 bp, Homo sapiens
  misc_feature (1)...(405): n = A,T,C or G
attgaggacacaatcacaaagaaaggcaggtggcgggagtgcaccaccatgtgacagcattgttgtggcctactatttctgtggggaacccatcccctaccggaccctggtgaggggccgtgctgtcaccctgggccagttcaaggagctgctaaccaagaaggggagctacagatactactttaagaaagtgagtgatgagtttgactgtggtgtggtatttgaggaagtacgggaggatgaggccgncttgcctgtctttgaagaaaagatcatcggcanggnggaaaaggtggactgagcactgggcagcacacccggagcacaccatcactactgtgcattgncatcagncaggtggncagccttgtcctnaggancctggtgnggggaacaacacaagat

SEQ ID NO: 966 - DNA, 303 bp, Homo sapiens
  misc_feature (1)...(303): n = A,T,C or G
cgccaaccctgagtaacagngacctnaagtattcaggcanngacggcgctctncatanntgtcagtctgtcctcccctgccgaagtcacatcctccgtgcgacaggattcttggtgtgctctggccctggcctgagctggtgctaccaagaggcaaggagggctctgaaggcctcataccanttgtgtctgatattgtccagcagtncagatggcagcaaaaatgcngacataccattccttcgatgcgtganttcngtgcctttgttttgaaagagatatatttctcaagaagcttactgaa

SEQ ID NO: 967 - DNA, 318 bp, Homo sapiens
  misc_feature (1)...(318): n = A,T,C or G
atgaccgctcttctcacgcgcataccaacaacattcgcaaagnctgtggtcaaccttgtagattctatttacaaggaacagctcaacaccagggttgtcctggtggcatgtcgagacctggaccgagaaggatcacattgacatcaccatcaaccccgtgcagatgctacatgacttctccaagtaccggcagcgaatcaaacagcacgctgacgcnggtccacctcatactcgcgcgtgacattccattatnagagaagcagtctgagntactttggaggcgngtgttctcgaataagaggggctggtgggaatgag

SEQ ID NO: 968 - DNA, 453 bp, Homo sapiens
  misc_feature (1)...(453): n = A,T,C or G
cttggggctggacaggtannacgganggttgcatagccccacctttggatcacatggagaatcagcaggaccttcaggactccagagtttgaagaatttaactgggaagccccgactccctctttttcaccgatggccagaggcgaatcgacttcatcctcgtgtatgaagatgagagcaaaaaggagaacaataagaaagggacaaatgagaaacagaagaggaaaagacaagcatacgaatctaaccttatctgccatgggctgcanctggaagcancangatctgtttctgatgacaagctngngtncgtaaaagtgcacgcgccctgggaagtgctgtgcacctatgctgagatcatgcacatcaaacncccgctaaagccaaacgacctgaaaacgcgctcgccctttggcaacctnaantggttcaccanggccctccgggtgaacg

SEQ ID NO: 969 - DNA, 511 bp, Homo sapiens
  misc_feature (1)...(511): n = A,T,C or G
ctacaacgttgtcagtgacgaagcgctctgggggagacatcctccagtctggctgctgaggttaagccccagtgtggatgctgttgccaagactacagaccattgccttgcttccttgcccacgcccaggtgaagttcaggaaggctcttgggtcctaggcgccaattcaaggtgctgtcctaaggccaccgggtccctgggatcttgtgggtaggaggtggcaggtcgaaggaggctgcagcatcgcactggggtcaccatgacagactcagactgacatctggcagagcatcacaggcatgcgtccatgaagtcactggcctcaagcccaagtggtgggcagtgacagaagagctgccgggtctgttgagctcaaccttttcctgtagattgtcttagtctcactttcaagctgtctaatgtcaattctgtttttcttttttcctccatggggntaatgatactagagatagggaatattagcaatcagtttttgtcatggctggtccc

SEQ ID NO: 970 - DNA, 278 bp, Homo sapiens
  misc_feature (1)...(278): n = A,T,C or G
agaagattaaagtctatgagtatggnacagncatccaggatgcagtggatattcattaccctgagaatgaaatgacctgcaattccaaaatcagctgtatcagttggagnagttaccataagaacctgctagccagcagngattatgaaggcactgttntactatggnnnggnttcacaggacngaggtcaanggnctatcaggngcatgaaaaanggtgtnnnnagngntnnctttaatctgatgnatcctaacctntctggcttcattgttctgat

SEQ ID NO: 971 - DNA, 371 bp, Homo sapiens
  misc_feature (1)...(371): n = A,T,C or G
tgaggtatacaatgtttacatggctgggnggcanctgtgttctaagcggtaccgggagtttgccatactgcaccaaaacctgaagagagaatttgccaactttacatttcctcgacttccaggaaagtggccattctcattatcagaacaacaattggatgcccggcgtcgtgggttggaagaatatctagaaaaggtgtgttcaatccgagtcattggtgagagtgacatcatgcaggaattcctgtctgagtctgatgagaattacaatggtgtgtctgatgtagaactgagagtagcactaccggatggaacaacggttactgtcagagttaagaagaacagtactacagaccaagtgtaccaggcta

SEQ ID NO: 972 - DNA, 334 bp, Homo sapiens
  misc_feature (1)...(334): n = A,T,C or G
ggcgtggacagcacagggaccaggctgctctttatggctaatgaagcngacttggatgaagagctggtcattaagggntccatatctgcaagnagcacnntatgatacactagcacncaggcacgttgttgnatcncccntcctctacatgcctgnngaagatacacntggggntaggatnaatgganaatggngcatgacagctctttatcanntanccagcttgtatncataccnacgacgcatctgaccttgccctccctatgatgnctgctggnctgctttgacgaggagacangatggaaagattnggntagagcacaggtccgatgct

SEQ ID NO: 973 - DNA, 236 bp, Homo sapiens; identical to SEQ ID NO: 39
  misc_feature (1)...(236): n = A,T,C or G

SEQ ID NO: 974 - DNA, 530 bp, Homo sapiens
  misc_feature (1)...(530): n = A,T,C or G
gactgaggtacccgtcccgcgtgtttgtgggagacaccttctgttactttgcgggcatgacttttgccgtggtggggatcttgggacacttcagcaagaccatgctgctcttctttatgccacaagtattcaatttcctctactcactgccttanacttgncatatnatnccctgccctcgacaccggatgcccagactcaacgcaaagacaggcaaactggaaatgagctattccaagttcaagaccaagaacctctctttcctgggcacctttattttaaaggtagcagagaacctccggttagtgacagttcaccaaggtgagagtgaggacggtgccttcactgagtgtaacaacatgaccctcatcaacttgctacttaaagtctttgggcctacacatgagagaaacctcaccctgctcctgctgctcctgcaggtcctaagcagcgccgccaccttctccattcgttaccaactcgtccgactcttctatgacgtctgagctccctgacagctgccaccttaa

SEQ ID NO: 975 - DNA, 505 bp, Homo sapiens
  misc_feature (1)...(505): n = A,T,C or G
actgaggaggaagaccatgtgcggcacgctggnctatctgcccccagagatgattgaggggcgcatgcataatgaaatggtagatctatggtgcatcggggtgctctgctatgaactgatggtggggaacccacccttcgagagccctagccacagtgagacgtatcgtcggattgtcaaggtgcganagcctttgngtnctgtnggagccagggtctgncgacactnaaagtggatgtncacggcatctgcaaaaatgttcctgctttgnnannactttntatttattctatnnttgaantccnnnccaantcaaggagggttctgcctccctctgccctttagcctgctccttggttttttgtccctgtcatttttcagtgttctttgtatgtctgtgtatgtgttctgagaaggggtgggaactggaaactattcctagctccagttctaggggatctgatctctcttctgacctctacaggcaaaattaggcacccctgtt

SEQ ID NO: 976 - DNA, 562 bp, Homo sapiens
  misc_feature (1)...(562): n = A,T,C or G
acctaggacgcagcttttcttgngaactggccgngatggcgnagggtacacagaacaggnnantgnnctatcngngntccggagcccnactgccagnagnnngatgaccntgancncannacatacnggcatgaganggtgactgntactgannangacnttcatgctcacnnnagnccatgcatggangagctncgtatgncatgatcacattgnttatacacacgcgtggaaagactgnnnaatcntggtattcccagagctttgggttacatttttcactgagggaagaacactggcaagaagactggncattcatactctctctagctagtcagcctggagcaagtttggaacagacncacatttttgtacttgcacatattcttagacgaccaattatagtttatggagtnaaatattataagagtttccggggagaanctttaggatatactcgggntcaaggagtttatctgcctttgttgcggnaacagagtttttgttggaaaagnccaatcgcactgggctatacaaggggccacttctctgctttggttgc

SEQ ID NO: 977 - DNA, 305 bp, Homo sapiens
ggttattgaaaatgcaagagagaaaatattaagcaacaaatctcttcaagaaaaactagcagaaaacataaataagtttttgactagtgatagtagtgttgctcaagtacctaagcagacagacagcaacccgacagagccagaaacgtcaattgatgaactgctaggccttccgagtgaaatccatatgtctgaagaagccatacaagatattttggagcagacagaatcagaccccgcctttcaggcactctttgatctttttgactatggtaaaacaaagaacaataaaaatatgccacaaa

SEQ ID NO: 978 - DNA, 371 bp, Homo sapiens
tgaggaaaccaagtatcttttaccaagtctggaaaaagaattattcttggcagagcacagtgatcttgaagaaggtggactggatctgaatgtctccttaaaacctgttagtttctatatatcagacaaaaaggaaatgctgcagcaatgcttctgtatcataggagagaagaagttgcagaagatgctccctgatgtacttgaaggtactttcccagtgagctggctgcacacgcggagaaacagccttcatctgtagcagtcatgcctttgaatgtagtgtgtgattggatgttctaatctgaaacaagttacttgaaagaatttaaggaagaaaatttagagaaccttaaataaatggccttatatat

SEQ ID NO: 979 - DNA, 232 bp, Homo sapiens
  misc_feature (1)...(232): n = A,T,C or G
gactgagagtacccctgcgaaagagctcctaaggaaggagctgcaaattccggactgtccattctactggagcggatcatttgtgatcttgaaaaatgccttgggacagctttatcttcaatattagaaacagaaatgaaaattgcttttggaaatctttggatggaggtgcctgnatttgaaaccaccatggactctaataaatctattacagngctttaaaaaacaaaaa

SEQ ID NO: 980 - DNA, 356 bp, Homo sapiens
  misc_feature (1)...(356): n = A,T,C or G
gttacataacgtactatnagacaatnactggaatgagttctganggaggngncnagnaaaccgggtggctcattnnanaccgcatgaccctnatcngcngagaggaaaaacagcttgaaaagaatttacaaganttggctacagnattagctccactttacaagcagatggctccagttgcttatcaaaattaggcggaatatgaagaagttggtggagactgtccacttggaaatgaanaggggcgtcctttctctggngtcacctgttgcatggntttttgtgcccattctcacaaggacnttcacatnatgcncaantggaagcacccgcggtgtgtactgttgattcgagca

SEQ ID NO: 981 - DNA, 204 bp, Homo sapiens
gagaagccaaccttaatgcagcacattctcagatgtgactacgaggcctgccgacagtatctcgtgaatctggagcaagccgtggttttagagcagaacctgcagatgttacagacgttcatcagccacagatgtgatgggaaccggaacattttacatgcttgtgtatcagtttgctttccaaccagcaataaggaaactaaa

SEQ ID NO: 982 - DNA, 560 bp, Homo sapiens
  misc_feature (1)...(560): n = A,T,C or G
actgagatcgagatggcacagaagctgctgactccgacttaggcgagctcatcagcaagatgaagctggcgcagcagtacgtcatgaccagcctgcagcaggagtataagaagcagatgctgacagctgctcacgccctggctgtggatgccaagaacctacttgatgttattgatcaagcaagactgaaaatgctagggcagacacnggccacactgagcccctggccattgaacgtggctttctgccctttgggagatcttctctagcattccaccagcagcgaggaagtaaccttagcctctgtagcccgtgctcacggctccaactgaatgacagctagctgaaagtctctcttgtataagtttcatcacttatacatggttttgattttgttatttttctaaatagtgttcagaaaactctggatccaaaatgtggcatttttctgagaatgaagattatacattaagaagcttttaaaatatacttggtgttcaaattggnatgngngntcctagaagnggnaattcatactgcctccaacgtctgtacaagag

SEQ ID NO: 983 - DNA, 102 bp, Homo sapiens
  misc_feature (1)...(102): n = A,T,C or G
cttccctgaggctacgtgnngacctgccggagagcanacaggacagctcagcgcagatccgcagacgaaaggnntccggagacccatactgggcgtattctg

SEQ ID NO: 984 - DNA, 395 bp, Homo sapiens
ggtctttcaggcacactcttccgtgtccatgctcggccagacctcaaccaccgcttccaggtgttccgcggtattctcgaggaccagtgccgccagctggaccccgacccatagttctggtgacctgcttctagaccattctctgctcctggccagcccgtgtcccctgcggctccatggcctgggggcctcaccctctgtgatgatactgatcacctgtgccagactgtgggcctctcagtttccagactgcagcttctctgctggctgcgacgacagtggggctcagctctgcttacaagcccagtggctgtcttacagtccccaggtcctccaggctcggggcagggagcagccatcgagtgtgaaaataaaacacctcaaaccaaaaaaaa

SEQ ID NO: 985 - DNA, 527 bp, Homo sapiens
  misc_feature (1)...(527): n = A,T,C or G
ctccttactatgacaacgtccgtccctctcttacccagattctgatgcagtgctcatttgctttgacatcagtagaccagagactctggacagtgtcttaaaaaagtggaaaggtgagatccaggagttttgtcccaataccaagatgctgttggtgggctgcaagtctgatctgcggacagatgtcagcacattagtggaactctcaaatcacaggcagactcctgtgtcatatgaccagggggcaaatatggccaagcagatcggagcagccacttacatagaatgctcagctttacagtcagaaaacagcgtcagagacatttttcacgtcgccaccttggcgtgtgtaaataagacaaataaaagcgttaagcggaacaaatcgcagagggccacaaagcggatttcgcacatgcctagcagaccagaactctcagcagttgctacggacttacgaaaggacaaagcgaanagctgtactgtgatgtgaggcttcgccgtctataaggaggacgcgggaatat

SEQ ID NO: 986 - DNA, 318 bp, Homo sapiens
  misc_feature (1)...(318): n = A,T,C or G
ctcttttaccgaagtttatcctcanagttgaagaanacacaggatcagctttccgcgtatccagagaaacacagagaagccacatgagggtgctgtgaggctggttganaagngcagtgaggtggacctgancatcgtcatcctatggnaggnatacctntnngnanatnccntgcagcgttanttnacaaggccancntcanggttntnnatcgcacttnntgggaangaancctttncacactctcagaaagagganccaccatnaaagggaactattaaaganttgntcaggccacaaaacactacagtttccac

SEQ ID NO: 987 - DNA, 269 bp, Homo sapiens
  misc_feature (1)...(269): n = A,T,C or G
gtagcaaatgtctgttattaatcagactgcaggngatnccacagtncttgatagataatgntccaaaaaggtcttccttaatngaaganacaaangaatggccttngnaaagctttngtnaacaactttgcaatgacctttgtaatccctcctgggaggttcnacatggggcaccgtncngnnatttaaggctnnacaaatatgtnncatgcacaccctnacccncaccgnaaaacacaaatagtnttatgaaaaggaaaaacaaaaaa

SEQ ID NO: 988 - DNA, 444 bp, Homo sapiens
  misc_feature (1)...(444): n = A,T,C or G
actgaggtgactgtttgaattttggaataaagnctcttgaggaaattaaatcaaagaaaatgaaggaaaaatccaagaagcaaggtgaaggctcctcggnagtntccagtgttttacagcatcctcannccantccangncctgagaagganaatgttccnactgtggngaggatggcnacttntatccancnnaccanannagcccttgtttanactgngnctttctgagagactggggaaacgaanactttcngtgggtggtgatagtgaccctccattaaagcgaagccttgcncanaggctgggaaaaaangtggaatcagccataanctaacattgataangcaccnaagaanggnnnngtctttgcttnttacnnacatggcctgnctgtntgnncttatatccggtgtggtccccgttcttcgctcaggtgaacgtt

SEQ ID NO: 989 - DNA, 402 bp, Homo sapiens
actgagggattcgatcagtgagcttctatgaacacattatcactgtgggcacagggcagggctccctgctgttctatgacatccgagctcaaagatttttggaagagaggctctcagcttgttatgggtccaagcccagactcgcaggggagaatctgaaactaactacctggcaggggcgtggcttgaatcatgatgaaacctggaggaattacttttcggacattgacttcttccccaatgctgtttacacccactgctacgactcgtccggaacgaaactctttgtggcagggggccccctcccttctgggctccacggaaactatgctggactgtggagttaatgacaactaactttctcccaaaatgcagatttacactaacttccaaaaaaaaaaa

SEQ ID NO: 990 - DNA, 105 bp, Homo sapiens
  misc_feature (1)...(105): n = A,T,C or G
acggaacacgaggagatgatgccttcagagcaaatgtgtatggtgactctatagttgtgcancaacacattagcgtggatggaagtcgatcttacaaaaaaaaaa

SEQ ID NO: 991 - DNA, 280 bp, Homo sapiens
  misc_feature (1)...(280): n = A,T,C or G
cattcccaggtttgatctgccagcangacacgcctgactgctccagtcacaggaacttaatgaaggcaacctttccaccatccagcggcggtgccgtgaccactccaaagggcagctccaggatgaagctgtccagacctaaagggagtgttggaacttgccaggcggttagggttgagggcggggtcgatagggggcgctctnaccctcaggcttacaacaggaaggaagccaccttcctcaccccacttgtacctcaaactttttaaaaaagaaataa

SEQ ID NO: 992 - DNA, 517 bp, Homo sapiens
  misc_feature (1)...(517): n = A,T,C or G
aactgaggcactataagactgacttcgacaagaataagatctggtatgaacatctggctcatcgacgacatggtggcccaggtgctcaagtnttccggtggctttgtgtgggcttgcaaaaactatgatggagacgtgcagtctgacatcctggctcaaggctttggctccctcggcctgatgacatctgtgctggtctgccctgatgggaagacaattgaggctgaggctgctcatgggacagtcacccgccattaccgagaacaccagaagggccggcccaccagtaccaaccctattgccagcatctttgcctggacacggggtctggagcatcgtgggaagctggatgggaaccaggaccttatcaggtttgcacagacgctggagaaggtgtgcgtgcagactgtggagagcggagcgatgaccaaggacctggctggctgtatccatggcctcagcaatgtgaagctgaacgagcacttcctgaacaccacagacttcctggacaccattg

SEQ ID NO: 993 - DNA, 360 bp, Homo sapiens
aactgaggatgaattgatcctgagttaaagcagacactaaatgctatcaaactagaagaaaaaggagtttatgtccaggcatctacactgggctctttggaagctcttcttgaatttctgaaaacatcagaggtgccatatgcaggaattaacattggcccagtccataaaaaggacgttatgaaggcttcagtgatgttggaacatgatccccagtatgcagtaattttggcctttgatgtaagaattgaacgggacgcacaagagatggctgatagtttgggagttagaatctttagtgcagaaattatttatcacttatttgatgcctttacaaaatacagacaggactacaaaaaa

SEQ ID NO: 994 - DNA, 524 bp, Homo sapiens; identical to SEQ ID NO: 40
  misc_feature (1)...(524): n = A,T,C or G

SEQ ID NO: 995 - DNA, 153 bp, Homo sapiens
taatgaaaaaaaggatcagccctggagcaaaatgagtcacagaccttcaaagtcgaggtatcgtatatggagatctataacgagaaggtccgggacctcttggaccccaaagggtgagtgagtgctttgaagtaaagtgtaaaattaaaaaaa

SEQ ID NO: 996 - DNA, 199 bp, Homo sapiens
  misc_feature (1)...(199): n = A,T,C or G
gcccagtttgcagtcnagtagtgtgctgagagacacatcatagacaacttttttgtgaaggacaccactgaagttcctagtagtacagtagaaaagtctaatcaggtatgtacaagcctgtgaagacantgcanaagctaatgggttttgtgtagagtgngtttgaatggntctgcaagacatgtattagagctcacca

SEQ ID NO: 997 - DNA, 219 bp, Homo sapiens
  misc_feature (1)...(219): n = A,T,C or G
ctcccggctgcgagaggcgcagcctgcgccactccagacagctggaggtgcctcggccctacatcgcgcgctcgattctccatcctgccagctgtcttccatcctgggaaccagaagcaatatggtggctttgacaacaggggcttggagccaggccaccgctatgncctctttgtgcttgctgtgttgcagaanaatgagcctgtatgtccaaaataa

SEQ ID NO: 998 - DNA, 516 bp, Homo sapiens
  misc_feature (1)...(516): n = A,T,C or G
aactgaggtacaactgatgagaaaaaaagagcaagagaggaaaggagagacttctgctgccaacatgcagagaagtattatgtcattttttcaacccacaaaagaaggtaaagcgaagaagccagagaaggagacacccagcagcatcagagagaaggaaccccctccaaaggtggccgcctgaaggagaggaatcaagtggtgcccgagagtgattctccagtgaagaggacaggaaggaaggtagcccaggttctgagctgtgaaggggaggacgaagatgaagcccctggcacccccaaagtccagaagcctgtgtcagactctgaacagagctctcctcccagccctgacacatgtcctgagaacagtcctgtcttcaactgcagctcccccatggacatctccccatcaggattcccaaagcgtcgaactgcgcggaagcagctccccaaacggacaattcaagacactnttgaggagcagaatgaggacaaaaccaaaacagctaaaaaa

SEQ ID NO: 999 - DNA, 354 bp, Homo sapiens
  misc_feature (1)...(354): n = A,T,C or G
gactgaggggctgactagaggagacagcaaaacacgaagaaacttgacgccatgaccctcattaaagaagacatgtccatcttcgggcactgccctgcccatgatgacttctatttggttgtatgtaaccactgcagccaggtggtgaagccccaagccttccagaagcattgcgaaagaagacatgggccnctcagcaagntttatncccgggccccacnccnacctgcagcnnntgncagaangtcaaatacngncggtgcacgcanactggctatgtgtacaaaanggactancgatanggtataattctattcatctgtcatcggaagnattnttctttgcaggattctt

SEQ ID NO: 1000 - DNA, 516 bp, Homo sapiens
  misc_feature (1)...(516): n = A,T,C or G
gactgagccacccttggggaagtctggntccagaagacatctgaaatgaatacagataaacagtatttttgccgaactcacttgggacatcttttaaatcctggagacctggtgctgggatttgatttggccaactgtaacttaaatgatgagtatgtcaacaaaatgaactcagacagagttccagatgtggtgttaattaagaagagctatgaccgcaccaaacgccagcgccgtagaaactggaaactgaaagagcttgcaagagacagagaaaacatggacacagatgatgaaaggcaatatcaagattttcttgaagatcttgaagaagatgaggcaattagaaaacatgtcaacatttacagagatgcaaccatccctgtggaaagtgacacagatgatgaaggagcacctcgaattagtctggctgagatgcttgaagaccttcatatttctcaagatgccactggtgaagaaggtgcatcaatgatgtcatgatgagtcatattattt

SEQ ID NO: 1001 - DNA, 312 bp, Homo sapiens
acactcccaaaagggaaagcttgtcccacgaggagcacccccacagccaccctctctatggacatggcgtatgcaagtggccaggctgtgaggcggtttgtgacgacttcccagcctttctaaaacatctcaacagtgagcatgcgctggacgatagaagcacagctcaatgtagagtacaaatgcaggttgtacagcagttagagctacagcttgcaaaagacaaagagcgcctgcaagccatgatgacccacctgcatgtgaagtctacagaacccaaagctgcccctcagcccctgaatctggtatcaa

SEQ ID NO: 1002 - DNA, 153 bp, Homo sapiens
  misc_feature (1)...(153): n = A,T,C or G
tttaacggagctgcgattntcatttctaacacgttcaatccggntaagtcggacgcggaggatggggaagggacggtggcttcctggnagctccggntagaaggncggnctcctggaggacgccgccttgtccaaatatgacgccaccaagca

SEQ ID NO: 1003 - DNA, 518 bp, Homo sapiens
  misc_feature (1)...(518): n = A,T,C or G
tgagataaccctggagcagatatgctgtcaacaacactggcgaacatgctgatgaccaggacggtgactccaggttctcggatgttattctggcancaattttggcaaccaaatctgaaatgtgcaggncaaaaatttgaactgangattgataatgnacaggtttgttgggcacccaacactgctgcagcatgctctggggcaggtctccaaaacagatccatctccaaagcgggaagctccgaccatgattctttttaacgtggtatttgcactgagggccaatgctgatccatcagtgataaactgtctacacaacttgtcccgccgaattgctactgncctgcagcatgaggagcgccgctgccagtacctcactcgagaggccaagctgatcctagcacttcaggatgaggtgtctgctatggcctgatgcaaatgaaggtnctnagtccncattccagcacatnctacccaagngcaagctgnctcgggacctcaaagaagctttatgacag

SEQ ID NO: 1004 - DNA, 231 bp, Homo sapiens
  misc_feature (1)...(231): n = A,T,C or G
acagagaagtcccttgtcagaaacactagatgagaagccttctgatatgactctacccttancgctttcacgttgggactgaagaccaccagatgctcctgcctgtnacggacagncagtctcctgcntcagacacgctgctgaggtccacggnngaatgggnacntcggaaccgcagntgatttttttacatcantnnnactcgactttnagggcctggacttgcataga

SEQ ID NO: 1005 - DNA, 495 bp, Homo sapiens
  misc_feature (1)...(495): n = A,T,C or G
gactgagtgatgcggcccagggcagcctgcggctcatcctgaacacgaagctgtgggcacagatgcagatggataaggccagtgaaaagagcatccgcatcacagccaccgacgctgaggaccagggtgtcaaggttttcctgatctcggccagctccaaagacacaggccaacatgtatgctgcactgcaccaccgcatcctggctctgcgtagccgggctgaacaggaacaggaggccaaggcgcccccacctgagccaggagccacccgggccaccngaggaggaagacagtgatgagggatgctgttctggctccctccggtgtcacgggggctggcacaggtgatgaaggagatggccaggctcctgggagcacatagcggcggagccactgcaccaggctgctgctttgttgtctgtctgctgcccgtccctccctgcaggccgcatcatgggtggtgtctattgccggggtggccacaggctggatcc

SEQ ID NO: 1006 - DNA, 414 bp, Homo sapiens
agcatatctgaaaatgaaagaaggctggtttctcaggaggcttggagcaagctgcagcagtacttcccaaaggctcccgagttcccaagttacagagagtgctgctcgcagtgcaagatactagaacgagaaggtgaagaaaacgaagccttgcataagatgatagcaaacgagcagaagacctcacttccaaacttgttccaggacaaaaacagaccatgtctcagtaactggccagaggacacggatgctctctatattgtgtcgcacttctttttagatgaatggcggaaatttgttagaaagcctgcaaggtctgctcctgtgtcgtcaattgggaatgctgcccttctgtgtccacatggaggactcatgtttacatttccttccctcaccaaagaagactcgaaactt

SEQ ID NO: 1007 - DNA, 169 bp, Homo sapiens
gactgaggtgagccggctactttacagttttgccaccgccttccgccgctctgccaagcagaccccactctcagccacagctgcaccacagactcctgacagcgacatctttaccttctctgtgtctttagaaataaaagaagatgatggtaaaggttaaaaaaaaaaa

SEQ ID NO: 1008 - DNA, 528 bp, Homo sapiens
  misc_feature (1)...(528): n = A,T,C or G
actgagctacaggtacaagaaagaagagncaagggaaggccagaggcgaagaagttgataagttagccaggggccaccaggcacttgagcggaggcgagaaggaggcagggaggaccaaaggcaccaggaagggaggactgagagagcaaggtctgaaagacgcagagctcagaactcacgagatgcagactggagagatcccctagcaaagcacatagacgacagaagccatgagaatagtcacagcagagttggcaatggccgagaacaaggctcacacagagagccagaagacaggcatggccgagccaaagaagcggagagagagaagagattctttttctgaaaatgagaagcaaagaagccgaaatcaggacagtgataatgttagaagaaaagatcgctccaagtcaagggagaggagtagaaggcattctggtcacaagggagacgacgccaggtgtcagaacagtgcagagaggcgctgggaaaagcctggcagacgccctgaacagtctagagagtca

SEQ ID NO: 1009 - DNA, 141 bp, Homo sapiens
tgaggagcttgacaattatgcagaatgggacttaagagacattgattttgttgaagacgactcagacatcttacatgctctgaagatggctgtggtggatatctatcattccaggttaaaagagaggcaaagaagaaaaaa

SEQ ID NO: 1010 - DNA, 409 bp, Homo sapiens; identical to SEQ ID NO: 41
  misc_feature (1)...(409): n = A,T,C or G

SEQ ID NO: 1011 - DNA, 480 bp, Homo sapiens
  misc_feature (1)...(480): n = A,T,C or G
actgaggttcagctcctaatcagcagcacagtgtactcagtgatgaagcgtctatcaacagaaagaacagggatgtaccaccaaaccattctcagctgaagcatgattctcatttggagataacaattccaaagtccttgaaactgaaagactcagagaaagtggatgaaaaacagcgtggtcatagatgcaggacacaaacgatttggagcagtgtcctgtaatatctgtggaatgctctatacagcattcaaatccagaagatgaaacacagcacctgcttttccacaaccagtttataagcgctgtaaagtatgtggnctggaaaaaggaangaattcttgctgaatatcctgatggtagaataataatggttcttcctgaanacccaaagtatgccctgaaaaaggttgatgaaattanagagatggttgacnntgatctgggttnccancaggntccttctgttgaggtattcca

SEQ ID NO: 1012 - DNA, 293 bp, Homo sapiens
  misc_feature (1)...(293): n = A,T,C or G
gtaacgactgctggctttttgcagagancttattctgcctacaaccccaatatccttagtttctttaattgntgagagactcctccacatcatcagagatgataatgaaaggatacagattgtcacagaaattatctcagagattcgtgcacccattgttaatgttgttgttgatccatctgatacaagaaagaaagaactcaagatggctgaaataaaagntaaacttattgaggctaaagaagctttggaaaattgcattgcntgtacaagattttgatcaggcatcaaaa

SEQ ID NO: 1013 - DNA, 272 bp, Homo sapiens
  misc_feature (1)...(272): n = A,T,C or G
agacactagtgcactgcagtctgaatgagctagaagatgcagcgctcacttttccagtccttttccaagatgtcatttatcaggtggaggcnaggaacacngctncnnatncncaagaacaangttgcgcactgttaagacatgggannnngnntttattttnccgcataatatccaggtaataanaataatgaaanatgcacaatacataaancntaaancgcagcgnggtgagcgccaccaggcttttccgatgaacattgaagtgtgtg

SEQ ID NO: 1014 - DNA, 397 bp, Homo sapiens
  misc_feature (1)...(397): n = A,T,C or G
catgcaagcaaaaccaagcaggtcatctccaagatcatggacacagtaaccttnccaacgtgccagctcatctcccgaagccactactcccccatttacctgtcattaatcatgctcttggctgccctgagctggcagtacctgagcaccctgtcccaggtcacagaagactatgtccagagagaacacctgattttgtttatccggatgtggaagttcccgtggagtgggnttttncttttcctccancctggatntngacttcccttgntttncctcctactntaaaanctttgggaaaactgagtgtnnnnacctttaggaacntggtnagnaggnnaggatgccnttgccctcancagnccnggtgctggnntgggacttgattactctgact

SEQ ID NO: 1015 - DNA, 452 bp, Homo sapiens
  misc_feature (1)...(452): n = A,T,C or G
catggccacatgcacagatcacngactttggctngtgnnaagagggcatcaggaganggagccnccatgnataccttnngtggcnccccggagtacattggcagcctgaggcgctagnagatacaaatgacctatatgtcngancagtngtantgtnnagagnntggtatgtagcctatgtatgatgatgatgatncnggcgtntgnccttctacaaccananancactgagcggcctntttnagctcattcttatggaggagatnnacattccngntcacacgacggacnaaaggccaagnncctgcnngatgngcctgntgganaaggacccacagcagaggctcggcggangtcccagtgatgcgaaggaggtcatggagcatagattcttcctcagcatcaactggcaggacgtggtacanaaaaagctcctgccacccttcaatcct

SEQ ID NO: 1016 - DNA, 516 bp, Homo sapiens
  misc_feature (1)...(516): n = A,T,C or G
tgagccataccccggaaaggngtctgantttggaattagaancggcagccggcttcaagcagacgacttcctgcaggactatactttgctgnnnaacattcttgatanngaanatcttgnaaaggatgttgantttgaantaagntggtgacangccctgaataagnggggccnnaannagctnangatgctgccaaaagcattgcnnacggnaggnatnncggngcccagcctnncacctgcacancacaagagcangatgatgngctcatagnngattgagacgaagaaggcccttcaaatancaccanactgcagcggngacnacaaggcccgcatgcggaagctggaaganaatgaggctgncnntaccaagaagtgccggttggagcanatggaagatncagatgacgtgatagcganagactgagcaggctcctgcccttggnctggncggaaccaaaagttagattctttgtgtggctttgatggntccgntcagcgttcattcgctga

SEQ ID NO: 1017 - DNA, 285 bp, Homo sapiens
  misc_feature (1)...(285): n = A,T,C or G
aagtggccatgcaggaaatggaagaatgtccaataagtaagaaaagagcaacatgggagacaattcttgatgggaagaggctgcctccatttgagacatttctctcagggacctacattacaatttactcttcgatggacaggagaaaccaacgataagtctacagctcctgttgccaagcctcttgccactagaaattcagagagccttcatcaggaaaataagcctggttctgttaaacctgcacaaactattgctgttaangagacgctgactacagagctg

SEQ ID NO: 1018 - DNA, 274 bp, Homo sapiens
  misc_feature (1)...(274): n = A,T,C or G
gactgaggaaaacttgatcggagcactcttggccatttttgggcacctggtggtcagcattgcccttaacctgcagaaatactgccacatccgcctagcaggctccaaggacccacgggcctacttcaagncccagccttgtgctgagaacaccggtgcttttccagtggnctcacctgcagcacagatgaagcctggggaatcgacggtaatgcggcactgatgcttgccaataaaaccaaccaaccaatcaaaaacttgaaggaaaaaaaaa

SEQ ID NO: 1019 - DNA, 370 bp, Homo sapiens
  misc_feature (1)...(370): n = A,T,C or G
tgagggcagcagcagcatgaccgngcanacgttnctggcaaacancctgactatcagngggctgagccccacccagatccagntgnagatggagcaggctctagccggagaggcccaccctggggagaaacggnggcagcatggcctgcacgtgtcccaactgcaaggatggngagaagaggtctggnagagcanggcaagaagaancactgtgtgccacatcccggactgcggnaagactttccggaagacatccttgntncggncccacgtccgcctgcncactggcgagcggccctttgtctgcaactggttcttctgtggaaagagattcactnggagcgatnaactccagcgacatgctatgcat

SEQ ID NO: 1020 - DNA, 479 bp, Homo sapiens
  misc_feature (1)...(479): n = A,T,C or G
actgaggcaaggcatctttacatttgtgactatcataagaacttaattcanagcgttcggaacagaaggaagaggaacggaagcgatgatnatgggggagactcgcctgttcaggacatcgacactccagaggttgatttgtaccaattacaagtaaatacacttagaagatacaaaagacacttcaagcttccaaccagaccaggtctaaataaagcacaacttgttgagatagttggttgccactttaagtctattccagtgaacgaaaaagacaccttaacatgtttcatctactcagtgaggaacgacaagaacaaatcggatctcaaggccgacagtggtgttcactaggagagatgctgttcacactagcccatagatgtctgcctggaaagaatgtttactggttttcagatgtagaaatgttcttgtgtattttttctaccgaggatttactttgactttttttttttttt

SEQ ID NO: 1021 - DNA, 122 bp, Homo sapiens
actgagccactggacggactgttgaactacccgaggctgaagttgttagaaatccccgaagtataactgcaaaacaagcaccagagacagacaagaaaaatgaaaagtcaaaagaaaaataa

SEQ ID NO: 1022 - DNA, 507 bp, Homo sapiens
gactgagattctgcttcgggaaggctgcaagaaaatcctcgtagctgactcattgtcgttgctgaaaaaaatgcaccgaacccaaatgaaaggcgttctggttgatgaagagaatatctgtgaatcatgcctttctcccatcctcccaacagatgcagcgaagcccttcagcgtggtggtcttccactgccggcacatgttccacaaggagtgcctgcctatgccgagcatgaatgctcctgcacaatactgcaacatctgtagtgctaagaaccgtgggcctggaagtgccatcctggagatgaagaagtaggcctgcctgcctgcccaccctttgccactctccactgagtgactgctggaccacagcagctgtgtcaacgccagtgctgttgagtgacgtgttcagggctcctcggagctccccgtcagttgttttctccagaccttccttccagaagctgctccttgtcaccgatggagaagtcgaagctcttcccatgccat

SEQ ID NO: 1023 - DNA, 122 bp, Homo sapiens
  misc_feature (1)...(122): n = A,T,C or G
gactgagattgaacctgctctgangataatacactgaaaatctggcgcttgaatanaggcctanaggagaaaccaggtgataaacattccatagtgggttggacctctcagaagaaaaaaaa

SEQ ID NO: 1024 - DNA, 497 bp, Homo sapiens
  misc_feature (1)...(497): n = A,T,C or G
atggagggaatgacaccagacgactagcgccagccgctccttnctntggttcttgcgctggacagatggggacnagagggccnacgcatgcatccacctctcnngagtgggcaggccatcnnaggnngcaanctntnnnnncnnnttcntnaggccattcnnaatgcctnactannncnangtgtacnngcncttaaanatngtnaactnacatnncgnnaggagncntnanactgactccaaaaccagagtcgncaccagcaccgtcttctaatggccagctctgccgttacttccctgcttgtaagaaaatggaatgtcccttctaccacccaaaacactgtaggtttaacactcagtgtacgagacctgactgcacattttatcaccccaccattactgtgccaccaagacacgccttgaaatggattcgacctcagagcagtgagtgatgccctagtcctacctggcagaagatcatgcagtttgaaagctta

SEQ ID NO: 1025 - DNA, 168 bp, Homo sapiens
  misc_feature (1)...(168): n = A,T,C or G
tgaggaaaaacaagagtggtggtggctttatattgcagataggaaagaacaaacattaatatccatgccatatcatgtgtgcacacatgnaggatacagaagaggtaattagccaacaatcttngcnntaatatcntacctttatgangtttcattaaaattttaata

SEQ ID NO: 1026 - DNA, 394 bp, Homo sapiens
  misc_feature (1)...(394): n = A,T,C or G
tgttagcatgaccaatgagtatggagcagagggttgagccacataatgattacttcagcacccagttcctgttgaactttgctgtccttggnacgcacagcatcacagtggagtcatcggtgagagatgccaatggcatcgtctggaagactggccccagaactactatgtttgtcaaatncctggaagacccctactcccagcagattcgcctacagcagcaggcccagcngcctttgcagccacagccacagccacagccgcagcctcgcagtgcctacacccaggttttagctgtgctacaagcatactactgccacactgnncagccatcagactacaagaagagtcttccgcatgtgcattangngtnantgttacagtgtgaaatctc

SEQ ID NO: 1027 - DNA, 209 bp, Homo sapiens
  misc_feature (1)...(209): n = A,T,C or G
agagctgtcggccatggagccgagtgatagcgccagtaccgctatggaggagcctgacagcctggaggtactggtgaagaccctggactctcagactcggacttttattgtgggggcccagatgaatgtaaaggagtttaaggaacacatagctgcctctgtcagcatcccttccgaggcggnagaggaggagggggagacttcacgcc

SEQ ID NO: 1028 - DNA, 308 bp, Homo sapiens
ttgagatgccgtgcgccacaacctcagcctgcacaagtgtttcgtccgtgtggagaacgtcaagggggccgtgtggactgtggatgagcgggaatatcagaaacggagaccgccaaagatgacagggagtcccactctggtgaagaacatgatctcgggcctcagttactggggcacttaacgccagcctacgggtccccgaaatggggtcctctcaccccgccccctcacctcctcctgtccttccctctcccagttaaaacggatgaccaaagacctttcttatgccggaagcaaaaaccaaaaaa

SEQ ID NO: 1029 - DNA, 493 bp, Homo sapiens
  misc_feature (1)...(493): n = A,T,C or G
gtgtcctaacgtgcttaaacttactccacaacgaagaaccagaagaaaaataattccttctcccttgaaagtacaacatactcagaagtctgcactgtctgaaagtacacagctcaatgattctttcagcaaagaacttcagcctattgtttatacgccagaggactgcaaaaaagctcaagacctgtttccatccttaacgagaacttcatcgcagtctgcaaatgtaatgaatgacaattcccagaaagcactgtgtagaatagagtctcctctcagcagaactgagtgcaaacagggtttgtactctacatctactctgtgtgatagcatcagaggcttgaagaataaatggcctgaacaagaaccactagcaagcagcaaaagcagtgtgcacaggatagagtcttcttcattttcaacaaangatttctatgcctgaatcagcaggtgtgccgtncctacatggnaatgactactgctgcaaagagga

SEQ ID NO: 1030 - DNA, 383 bp, Homo sapiens
  misc_feature (1)...(383): n = A,T,C or G
caaggaaaaagcaagttaagaagataacagatggactgcatggccttcaagangcaagcaaaaancgatgctgaagctttggctgctgcacagcagcacttcaatgctgtttctgctggcttgtccagtaacgaagatggagcagaagcaactctggctgggcagatgatagcctgtaaaaacgatatcagcaaagctcagactgaggccaagcaggctcagatgaagctgaaacatgcccaacaagaactaaagagtaagcaagcagaggttaagaagatggacagtggctacaagaaggatcaagacgcttttgaagctgtgaaaaaagctaaagaaaaacttgaaactgaaatgaagaagctaaattacgaaaaaaaaaa

SEQ ID NO: 1031 - DNA, 236 bp, Homo sapiens
  misc_feature (1)...(236): n = A,T,C or G
atttttttttaacttanngcaaaagttgncgctcctgccctgnggtgnggtcctcacagcacctgtttctanntttgcctnngttgnaaaacncgtctggaggactggttggggaagacagtgcctggcagtgactggacacccaatgccaggttcattatacnttcctggcttngagatggcctcaagccacgatgcatcaccanagacctcaaatggggaacgcctgtgccctt

SEQ ID NO: 1032 - DNA, 514 bp, Homo sapiens
actgagcttgtgggctttttgctcattggcgtggctgcctggggcaagggcctcggtgtggtgtctagcattcacatcattggaggagtcattgctgtgggagtcttccttctcctcatcgcggtggcaggactggtgggcgccgcgaaccaccatcaagtgctgctcttcttttatatgatcatcctaggtttggtcttcatcttccagtttggaatctcttgctcatgtctggctattaacagaaacacacaggcagatgtcatcaatgcttcgtggtcggtcttgagcaacagtacccggcatgaactggagagaagttttgactgctgtggcttgttcaaccttacaaccctgcgcctacaagatgatacttcctgtagtgcggtgtgcaaaactaagagctctacatgccagatgtgtggggagaggttccttaaacattcagacaaagccctcaagatcctaggaggtgttgggctcttctttagtttcacagagatccttggtgtac

SEQ ID NO: 1033 - DNA, 460 bp, Homo sapiens; identical to SEQ ID NO: 42
  misc_feature (1)...(460): n = A,T,C or G

SEQ ID NO: 1034 - DNA, 513 bp, Homo sapiens
tgaggtggggtctttcaattccaagagcccttccagaagttgaacggcatcgccaaagggccaggcttgtccactgaaccttctgtcccagatgcccaagtgtctaccaggcccagtcagtctgctgggaatgctgacgtgaacagcaaacgaaagaggtctgagaagctgaagcagcggggacctaagtggaagccctctaaggaggctgctgtcccaaagccgagcgccccttccagggttgaggactcgagaacacctcctgtgccgactccctctgaaatccgtgctgccccaaggcctaaggactgtgctccatcccttggggaagccaaaaagaaacagaaaggaaagcagcagttagcacagcagcctgctaatggagctgctcccctgaaagaagatgctgtttccaagggaccctcagccccctttgtgtctccccacagttccaccaggcccccaccagcaaaaaggaggaaatcaatgacaaagggcaacagccagcctcta

SEQ ID NO: 1035 - DNA, 192 bp, Homo sapiens
  misc_feature (1)...(192): n = A,T,C or G
ctctttgatgatgaagatcanacngcnaancgagaaatncaggcgccatttgtctaagattttgtcntaacaacatataaggcctcagcggcnccttcttcatgntntggaatgngcgganncattgcntcaagctcagctggnctccaagatcccacncattctgnaggagatgtatgatgccgacctgtt

SEQ ID NO: 1036 - DNA, 117 bp, Homo sapiens
  misc_feature (1)...(117): n = A,T,C or G
gatgacaaaagtatgcaagagccaccttctcaactgttggnnnaacgaangccttnctggaacaagaatggancntggagaatgcttgaaagnccatagacctggctttaagagccg

SEQ ID NO: 1037 - DNA, 514 bp, Homo sapiens
tgaggtgcacaagcttctgatcgtggtagagctcctgctgggggagatcccagaccgcctgcagttccgccagccctccctaaagcgctccctcatgccctacttccttctcacccaagctgttaggacaggaaatcttgccaagttcaaccaagttctggatcagtttggggagaagtttcaaacggatgggacctacaccctgattatccgactgcgacacaatgtgatcaagacaggtgtgcgcatgatcagcctgtcctattcccggatctccctggccgacatcgcccagaagctgcagctggatagcccagaagatgcagagttcattgtcgccaaggccatccgggacggcgtgattgaggccagcatcaatcacgagaagggatacgtccaatccaaagagatgattgacatctattccacccgggagccccagctggccttccaccagcgcatctccttctgtctggacatccacaacatgtctgtcaaggccatgcgctttcct

SEQ ID NO: 1038 - DNA, 354 bp, Homo sapiens
  misc_feature (1)...(354): n = A,T,C or G
ttgaggagttgaagctgtctttgaagagcaaagaagctttaattcagtgccttaaagaggaaaaatctcagatggcatctcctgacgagaacgtgtcatctggagaactccgaggactttctgccactctgagggaagaaaaagagagagacgctgaggaatggcagaaggagagaaaccactttgaagagaggatccaggcacttcaggaggacctgagagagaaggaaagagaaattgctacagagaagaaaaataacttaaagagttataaagccattcagggtctaaccatggcattaaaatcaaaggaaagagaggtatgtctgangagtgangtgggaaaaaaagaaa

SEQ ID NO: 1039 - DNA, 396 bp, Homo sapiens
actgaggagacagactggacagagccatggctcctaggactccttgccttccacctgctgtgcctccttctcacttgcttctcctcacagaggtataagctacagatcgggcacttcctgtgtctggtagtgttagtctatagtgccgagtacatcaacgaagtggctgcagtgaactggaggtaaagttggcttctcatgctctcgcctctgcctcagtcttcctctacagtggcactttcacatggcactttctaaagaaaagatgaagctcacagggaaattgaggacgccaggaatcgtggccacataaatattgaacagcctatacatatggggttaggccttaagaaataaattagttaaatattttcttgtttttgaccaaaaaaaaaa

SEQ ID NO: 1040 - DNA, 391 bp, Homo sapiens
  misc_feature (1)...(391): n = A,T,C or G
tgagttcttgtgtctgaagaatattcgcaccttcctcaaagtctgccatgacaaatttggactaagaaacagtgagctgtttgaccctttcgacctctttgatgtccgagacttcgggaaggtcatctctgcagtgtcccgtctgtccctgcacagcatcgcacagagcaaagggatcaggccatnttnatcagtnanagacanangananngatnnccncntgtatnngngcctgaaccagnngcttnnacactgnactgtnantgnntntggtcagcagccaggaggtgtgtgggagagtgttcacgctggggaaatcttgcaagcatgttatgatgggggcaaaattgctttcgatttaggtaataagatcagcaaattaatcctaaa

SEQ ID NO: 1041 - DNA, 501 bp, Homo sapiens
  misc_feature (1)...(501): n = A,T,C or G
actgaggcatatatagggagggctggacgctagctcaccaccgcactgcccagaggctcctgtctgactcactgccagccttcggtccctgcatcaccaaatagaagatggacgtcaccattcagcatccttggttcaagcgtgccctggggcccttctaccccagccgactgttcgaccagttcttcggcgagggcctttttgagtacgacctgctgcccttcctgtcttccaccatcagcccctactaccgccagtccctcttccgcactgtgctggactcgggcatctctgaggtccgatctgaccgggacaagtttgtcatcttcttggacgtgaagcacttctctnctgaggacctcaccgtgaaggtactggaggattttgtggagattcacggcaaacacaacgagaggcaggatgaccatggctacatttctcgtgaatttcaccgtcgctaccgtctgccttccaatgtggaccagtccgccctctcctgct

SEQ ID NO: 1042 - DNA, 512 bp, Homo sapiens
  misc_feature (1)...(512): n = A,T,C or G
gactgagcttgcaaccatattgctaatagaaaaaagtgtcagtatgttggcaactgttcctttgctcatagtccagaggagcgggaagtgtggacttacatgaaggataacaaaatacatgatatagagcaattttatgaactctggctgaagaaccaaaaaactgaaaaaagtgatgagacagccagtcactgtagcaaagaaaacngggaagcagatccatatgccaacagactatgctgaagtcactgtggacttccactgctggatgtgtgggaagaactgtaacagtgagaagcaatggcaagaccacatctcctctgagaagcacaaggagaaggttttccacactgaggatgaccagtactgctggcagcaccgcttccccactgggtacttcagtatttgtgagaggtatataaatggctcctgcacagaaggaagcagctgtaaatttgcacatggaaatgctgaacttcatgaatgggaagaaagaagaaaggccctacagg

SEQ ID NO: 1043 - DNA, 172 bp, Homo sapiens
  misc_feature (1)...(172): n = A,T,C or G
ggagactcacgggagccccggncttcacctgagctacctcagtcgccangagtggcaaganaaggaagaagaccctgacttgggggggaccatagnactcaaacccagagtaggggaacattnacnttacctcgcttgnccnggaaatnttgatgggctttgcccactactt

SEQ ID NO: 1044 - DNA, 294 bp, Homo sapiens
  misc_feature (1)...(294): n = A,T,C or G
tgaggcaaagcagtagtagcanaggntcttcagtccacgcagtggntcttttntgnacagcaacagaacaaacagataggaggcaaaacccagagagtggacagtgatacaagtaaccctgaaacgctgagngaccctcctggcacctgtccggaanaagtagaagaaaagccaccccctggacccaccataaccaccnaacntgttagaactggaccaatcaaacctcaggccatcaaaaccgaagaaacaaaatngtaaaggctgnggttnattggggatgggtgggtaggg

SEQ ID NO: 1045 - DNA, 175 bp, Homo sapiens
  misc_feature (1)...(175): n = A,T,C or G
gtcagatattcctaagagcaccaaaggcgatggagaagataacagaccaggaatgagagggggccatcaaatggtcattgacgtccagacagananngnctattnnctnngngggtgggatgagnncacangatcttgctganttnacgggcntaccacagttgaagcgagaacc

SEQ ID NO: 1046 - DNA, 346 bp, Homo sapiens
  misc_feature (1)...(346): n = A,T,C or G
gcaccttgttccacccattttcagctacagaatcaccaannggatttctctatcccgagggcccaggccccggccagtccgtacaatgactacanaagggcgcaaaggcgacagctaagtgttgggaagagtgggacaaccagaggcaggtagcaggtccagccaggaatcctgctgatgtgaactgaactcagggcatcccggggaaacagtacagagaggcttgcaacctgcccagcacaccgccgtcttgcctggggctgctaagcctaacaaactgtcttcaaagagctccagggtttcatttgccccattcctaggacacttctgggaggtgggagttcta

SEQ ID NO: 1047 - DNA, 181 bp, Homo sapiens
actgagggaccttagaagattgggatctagccattcagaaaacggagacgcgcttggctcgtgtgaatgagcagagaatgaaggccgcagagaaggaagcagctcttgtgcagcaggaagaagaaaaggccgagcagcggaagaaggtgcgggcggagaagaaagccctgaaaaaaaaaaa

SEQ ID NO: 1048 - DNA, 135 bp, Homo sapiens
  misc_feature (1)...(135): n = A,T,C or G
tgtctatacggccccgaccactatctcncnctgaagncnggnttgacaaacccggncanctggnncacctttgangatgaccctgcttttcaatcttctcagaaaagaaaggatttttctctggaaaaaaaaaaa

SEQ ID NO: 1049 - DNA, 129 bp, Homo sapiens
gctaaggattacatgcccaccagcaaagaggagccaatccgcctgttacgggaggtggtgttgctgaccgatgatcggaaccttcgtgtaaaggcgctgacaaggaatgtgcctgtgagggacatcccg

SEQ ID NO: 1050 - DNA, 234 bp, Homo sapiens
  misc_feature (1)...(234): n = A,T,C or G
tgaggttacttccttgtcctgggccaaacatganncccattgctcttgggagccgctggcttgcttatgcagaaaataagctgattcgctgtcaccagtcccgtggaggagcctgtggagacaacattcagtcttacactgccactgtccttagtgctgctaaaacacatgaaaagtggcctgacgatggttgggaaagtggtgactcaacntgacaggcacattgccctcagg

SEQ ID NO: 1051 - DNA, 429 bp, Homo sapiens
  misc_feature (1)...(429): n = A,T,C or G
aagcggcagtttcctctgcagccgaagggaagacgacacacgcccttacccgcaccaaggaagccttcactcctccagacctgtgtccatgtggccctgtgaagacgccgactccatcccatttgaagaccggccgctctccaaactgaaggagtcggacaggtgctcggccagtgagaacctgtacttggacgctttgtccctggatgatgatccaggggatccgccacccctcaggaactgccttgccgaggtcagcctgggtttgtcccccgaggttcctaatggctggagggagctgtcattaagtgcanctagtnttgagcagagtacccctctcatcaggttccccagacaacctgtgcattgagccacgtgaaccgntgccattggcgatgtgatgactttatttggtgaacctgaccccgg

SEQ ID NO: 1052 - DNA, 302 bp, Homo sapiens
actgaggatatggttactggacttagtcctctgctcttcaggaagcttagtaatcctgacatatttgcacccactggaaaagttaaactccagcgacaacttagtcaggatgactgtaagttacggagaggaagcctggcaagttctctgtcgggtaagcagctgctccctttgtccagcagtgtacacagcagtgtgggacaggtaacttggcagcctacaggagaagcatcaaacctggttcgaatgagaaaccaatcccttggacagtctgcaccttcccttacggctggcttgacagg

SEQ ID NO: 1053 - DNA, 221 bp, Homo sapiens
  misc_feature (1)...(221): n = A,T,C or G
aatcttcaagagaaagaccttcaagcagnctggngagatgnctcatanacnaanagcacccctagctcctgtaagttcagtccccagcacccacatggtggctcaccatccatnactccagttctaggagagccaaggacctctttcacctnnatcangaccatactggcatgngctgcacaggcatccttgcangcaaaaacactttatcacgtgaaata

SEQ ID NO: 1054 - DNA, 257 bp, Homo sapiens
tggaagagtcagcatttactgggtcagctgaagatcattaaagacttttacctgctgggacgaggagaactgttccaggcctccacctccaccagcccagctttactgtctaaagaaacagtggcgtgacctccctcacacaagtcactgtggagccaagaactatgtctttatattgcttatctcagagtttacatttcttttttaaaaatatttcatttacttgtaaataaaaaatgattctcagaaaaaaaaaa

SEQ ID NO: 1055 - DNA, 542 bp, Homo sapiens
  misc_feature (1)...(542): n = A,T,C or G
ggctccgcagccttgtttctagcagcaaaagtagaagaacaaccaaagaaattggagcatgtcatcaaggtggcacacacttgcctgcacccacaggagtcacttcctgacacgaggagtgaggcttacctacaacaagttcaagatctggtgattttagagagtataattttgcagaccttagggtttgaactaacaattgatcacccacatacacatgtggtaaagtgcacccagcttgttcgaggatctcagactgaacagtagagaggtgaccaagcatcagccggccggcagtcagccctctgtttcctgactcctcgaagtgtgacagctgcttcatgttcctgctgttgggccttctccaccctggtggcttggactgtgagccatacaggaaaaggaactaaaagtcaacttttgtctggttggggtacttcacaaagtgcaaggacagatttggaaaagccaccaagtcacatataagttagcatttttcanaaaatcttgaaagttgctggcgttgggccagcaagtgggtc

SEQ ID NO: 1056 - DNA, 458 bp, Homo sapiens
  misc_feature (1)...(458): n = A,T,C or G
gaggcgcgatgatgcctattggccagaagctaaacgggctgctctggatgaccgttaccactcagacttcagccgccaggaccgctttcacgacttcgaccacagagacagaggccgttatcccaaccattctgtggataggagagaaggttcactggtcgatgatgggagacagagaaggacagcattaccctgaacgccatggaggacctgaacgccatggccgggactctcgagatggctggggctatggttcgaacaagagattgagtgaaggccgggggctgccccctcctcccaggcgtgactggggggagcatggccggngacttgaagatgaccgggcatggcagggcacggctgatggaggcatgatggagcgtgatcataagaggtggcaaggtggtgagaggagcatgtctggccactcggggcctggtcacatgatgaacccgttg

SEQ ID NO: 1057 - DNA, 189 bp, Homo sapiens
  misc_feature (1)...(189): n = A,T,C or G
cacagaatcgatctgananaagtggagagcgcatgnagtatntnnncaacaccaagatcaactccatcaacagggggctgagacaganaagcaagcgtgaatgaagtcttacacaatttttggaagcgctaccttcagaagagcaagcaggcctattgtnaaaacccagtttcatacaagtggaaggaa

SEQ ID NO: 1058 - DNA, 463 bp, Homo sapiens
  misc_feature (1)...(463): n = A,T,C or G
gagtctttaaaattcactggttgatggccgcccttcctttcaccaagtctctctcgttggtgttccatgcaatcgactaccactacatctcctcgcagggctttccgattgaaggctgggctgttgtatactacataactcacctgctaaagggcgcacttcctgttcatcaccatcgccctcatcggcactggctgggccttcatcaagcacatcctgtctgataaagacaagaagatcttcatgatngtcatcccgctccaggtcctggcgaatgtggcctacatcatcatagagtccactgaggagggcacaactgagtatggcctatggaaggactctctgttcctggatgacttgctttgctgnggcgccatcctctncccagtggtgnggtcaatcaggcctttacaagaagcctccgccacagatggaaaagncaagtgtctgctgctccccgtgc

SEQ ID NO: 1059 - DNA, 489 bp, Homo sapiens
  misc_feature (1)...(489): n = A,T,C or G
ccacggcctttggattcagcgtgcatattttatganccctacttacaggatgggatngagccgntctctggncgtgcaaagggtctacaccctgctaggactatgctatatcatgagcgacatgctgtctccttgcnctgcancctgaacgagcacaaccatcacctcatnaatgacttcactatganncaaatgaggcaaggngcattccttgtgaatgcagcccgaggnggcctggnggntgagaaagccttagctcangccctcangganggcaggatacnaggagctgccctggatgtgcacgagtctgagcccttcagcttcgcccagggcccattgaaggatgctccaaatctcatctgcacaccacacacagcctggtacagggaacaagcattnctagagatgagggaagcagctgncacttgagatcngcncgagcaantcncaggncgnatcccatcaaagcttaccaaactgtgtcaa

SEQ ID NO: 1060 - DNA, 537 bp, Homo sapiens
actgaggatcgcatggtccgctactgcctttaccaagtcgttatagaatgggctctagagatacacctgaacttgttgcttatccattaccacaagcgtcttcctcttacatgcatggaggcagtccgtctggctccgttgtaatggttagtggattacatcagctcaaaatgaattgttcaagagtcttcaacctgttctgcttgtatggaaatattgaaaaggtaaagtttatgaagaccattcctggcacagcactcgtagaaatgggtgacgagtacgcctgtggaaagagctgtcacccaccttaataatgtcaaactctttgggaaaagacttaatgtttgtgtgtctaaacagcactcagttgttcccagtcaaatatttgagctagaggatggtacgagcagctacaaagattttgcaatgagcaaaaataatcgctttacaagtgctggacaagcatctaagaatataatccagccaccgtcatgtgtgctgcattattacaatgttccgctgtgtgtcacagattac

SEQ ID NO: 1061 - DNA, 426 bp, Homo sapiens
  misc_feature (1)...(426): n = A,T,C or G
tttgggtaactttaggtgtctgagaggaaanacactttatgaagatctatctttacantcctgcattggtgaaaaggatatgngaccttttgcaaagcggagccntantgaataaatgttaccagnctcatgaagcgcatattccctacctcctacagntcttcattgactacaatctttatggaatgaatttaataaacctggctgctgtcaagtcccgaaaagnnnganggaanggtnatgcatcacatgcnactggattatttaagcatnaattgtcaggaaantctcctgctggcactttatttaggtgggaagaggatgaaataccaaggttagcctctgnggncaaagaaatgaacattttatatatntatnntcgngattagccagcagtgggcatcatantnaaaacttaacttttac

SEQ ID NO: 1062 - DNA, 245 bp, Homo sapiens
tgaaggccctggtctactatgatgtccaggcctgcagattggatattggtaatgagaaaggagacacagccctgcacattgctgcacgctggggttacgagggcatcatagagacactgctgcagaatggagcccccacagcagtccagaacagactgaaggaaacaccactcaagtgtgcctctgaactcgaaggtagctctttccatctcggagcaaccctgtgactcttaaaaacaaacaaa

SEQ ID NO: 1063 - DNA, 121 bp, Homo sapiens
gactgaggataccatacttgcagaacttcttcagatacataaagagcacattgtgggctatcatgaacatgattctcttttggatcacaaagaagaagaagaactaactgaaaaaaaaaaa

SEQ ID NO: 1064 - DNA, 155 bp, Homo sapiens
gactgaggttgtggcagcattgcctgagaatgagagcagactttaatcccagtggtttttcgttggaattggcagtatgtgtgctttccgttggactgcttgccgtggtcttgtttctgtggcgaggcttccgatcaattcgaagcaaaaaaaaa

SEQ ID NO: 1065 - DNA, 408 bp, Homo sapiens
  misc_feature (1)...(408): n = A,T,C or G
ttgtgtttgataacctnttgctgcttgatcgcaatgtggatctcctgacgccactcgcctcccagctcacgtatgaaggcctcatcgatgagatttacggcattcaaaacagttatgtgaagttgcctccagagaagtttgcacccaagaagcagggtggnttttggtggtgggaaggaccttcccacggaggccaagaagcttnagntcaactccgcagaggagctctacgccgagatccgagacaagaacttcaacgctgtgggctctgtgctcagcaagaaggcgaagatcatctctgcagcgttcgaggncgngagtcagctctggcatacctgacggagagagacactttctgctaactattggcccctctgcctggnactgaaatgtttagatcttacagct

SEQ ID NO: 1066 - DNA, 548 bp, Homo sapiens
tgagagagaaaacggttggaagccaagcaacgggaagacatctgggaaggcagagaccagtctgtggtttgaatatcagttcctgaaaggaatgaatccatgattgggaagtggttgatattcttgagacaagaggatctttccagagctgtgcacatgcagatgagcatgttaaagaaaacatgaacaaaacagacgacttggagaacgagggtccagtcctcactcttgaattcagacctgtccactgtgacagagacgttaaaaggaactgtcatgtgggaaggaaaatggaagtggcttctaagcgtcctgggtggagcaggtcatcttcatgtgggtcaggcctccaggaagtctgaagcaaatgtaaagcaaaacaggattcaagcctgcagtgataggagtcggaggtccgtggcagggcagggcgctccttagtacttctcagagttgagaactgcaggatgaggggcagcagtaagacagggagaggaaacagctcacagacaggagtgcctggtgcactcagcccgtacagagactac

SEQ ID NO: 1067 - DNA, 112 bp, Homo sapiens
  misc_feature (1)...(112): n = A,T,C or G
ctctgcaacagcagcatgagggacnggggccttnttgctacngggtttgatccaggatcgagcagggaggatggctggngagacacctganctgaccttggagcagtcgacc

SEQ ID NO: 1068 - DNA, 244 bp, Homo sapiens
  misc_feature (1)...(244): n = A,T,C or G
tggtgaaggacccaaacaggagacattcacctttgccttaactttggntttnatccagtgtgngaaaanggctatgtttgccaagatctngnggatcgcactcggacctggcatctatgctgcctgttctgtctnctatntgngtgccatggtctccancaactnagccctgcagnttgtcaactatccaactcatgnnctcggtaaatnctgcaagncanggggnaggtatgctcctgcaagt

SEQ ID NO: 1069 - DNA, 496 bp, Homo sapiens
  misc_feature (1)...(496): n = A,T,C or G
gactgagaaagcagggcacctgccccagcgnggncatacccaagctcggnctctgtgaggaccanngtcaggnggacagccagngnnntggnancatganatgctgncgcaatggatgngggaaganggcctgcaccacacccaaattgctgagcgttnagcctcnannaccctgaggaaccggagagaggttgttnctgncgnactgtncatgtgnagncnatcctgnggcctnctttctctntggtctttgcattnnttnctggcccnacgaaagcatctcctttttctaaccaataaagtgatcgttttcatcaatggacaanctnctgaagaacggananaggttgtttctgccggactgtgcatctggagtcgttcctgtggcctcctttctctctggtctttgcatttcttcctggtccgacgaaagcatctcctttttctaaccaataaagtgatcgttttcagcaatggagaagctataaaaaaaaaa

SEQ ID NO: 1070 - DNA, 514 bp, Homo sapiens
  misc_feature (1)...(514): n = A,T,C or G
tgagttcctggcccagaacgaagagaagccgtatgtggttgcccacttccacgaatggttggctggcgttggtctgtgtctgtgccgtgcccggcgcttgccggtggcaaccatcttcaccactcatgccacagctgctggggcagctacctgtgtgctggcgctgtggacttctacaacaacctggagaatttcaatgtagacaaggaagcagggggagggcagaaggtgtgtgattggagtgtggagcgtgcagcagctcactgtgcccatgtcttcactaccgtatcccagatcaccgcaatcgaggctcaacacctccttaagagaaaaccaggtagggtctgagctgtggtccctacatgtggctgaggtaagaggctctatgtcacactcaacaccaatgccattttactccagagagtagaacaacttccctaagtcctggattgagatggtaactcgtaaatgaagctgnctgactctgtatnctgaaggataataggagctatag

SEQ ID NO: 1071 - DNA, 498 bp, Homo sapiens
tgagaacgtgtattgaactcagagcctgctgcaagccagtgtgcacgcgcttactcgctgacatttccgcaacccaagactcttcaattcatgaataatgacttgttgtattgatcaagacagtttggggcaaacatttcaagacgccattgacatattgatccaacaatcagctggagaaagtcaatactcctcagaaaatagaaattacatggctatcattaacccttatcctcacgtcagaggcaacgctaactactatggaatgtcacccacagagaaccccctctatgactggagaggtgtaacaaatggttctgcagacctgtatttggaaggaggcttccaccaatccgtacagaacatagctgaaagccagctggtacaaccccccttcttccagcaaaagggaggaagaggcaggagaaagcttcggctgtttgaataccttttcgaatccctgtgcaattcagagatggtgtcttgtattcagtgggc

SEQ ID NO: 1072 - DNA, 210 bp, Homo sapiens
ctgtcagcggtgtggagcttctcatgtttcctcagccggccttcatcggagaacgtcttcccacacgcctggcaggcgatctgctctcgatggtgaccgtagagcaagtactcgaacttcatgtcgctggccgccgtggtccagcccggagtctgttcatcttttacttcgctcatcccatcattaaaggttaaggcctgaaaaaaaaag

SEQ ID NO: 1073 - DNA, 389 bp, Homo sapiens
  misc_feature (1)...(389): n = A,T,C or G
gatttgagatcttgccattcgtctgcattacagagcagaatttcatggtggaagatgagacggttttgtgcaatattncatacatgggtgacgaggtgaaggaagaagatgagactttcatcgaagagctgatcaataactatgatggcaaagtccacggtgaagaagagatgatccctggatctgtgctgatcagcgatgctgtgtttctggagctggtggatgccctcaaccagtactctgatgaggaggaggacgggcacaacgacccctccgatggaaagcaagacgacagcaaagaggacctgccggtaacaagaaaacggaagcgccatgctatcgaaggcaacaaaaagagttccaagaaacagtttccaaatgaaaaaaaa

SEQ ID NO: 1074 - DNA, 478 bp, Homo sapiens
  misc_feature (1)...(478): n = A,T,C or G
actgagggtcctctgccggagagtctgtccttgtcacagccagtagtggcgtcaggaaggactccagggacctgcctatattttagtggtgttccaaaagtcctgccctctagccaaccacctatatcctgctcagaggagggagttggaaatgctaccctgagcccagtgatgggtgaggagtgtgtcagggtctggagccacnagcgccttgngctcnccnngctccttacttcagaggngctgnntctgngtgtcagnggantnctggtcttgggcttnttcctggttctgctctgtggcctcctctgctgtaccactgcngnctgnttccatccgcgcccagagttccactgatctagaacacggctttgagggcgacagactgcgcctcactctgctgtcaggtacaggncangttcttggggcccacttctgagtttagaagacctattacaaanagtgaagaactagactg

SEQ ID NO: 1075 - DNA, 548 bp, Homo sapiens
  misc_feature (1)...(548): n = A,T,C or G
ctattgatgagtatgtctgtcccagtgccagtcgacagaggacgccatgacagtgctcacaccactgacagagaaagattatgagggcttgaagagggtgctgcgctccttacaggcccacaagatggcgtggcctttccttgaaccggtagaccccaatgatgcaccaggattattacggtgttattaaagagccaatggaccttgccaccatggaagaaagaatacaaaaacggtattatgaaaagctgacagagttcgtggcagatatgaccaaaatttttgataacntgccgttattacaatccccgtgacacccctttttaccagtgtgcagaagttcttgaatcattctttgtacagaaactaaaaggattcaaggccagcaggtctcataacaacaagctgcaatctacagctccttagaactcagcgtgtctgtcacctaagctagacacagcaagtctggcgctctgaactatttaaactaangcgccagatattttcagtcaggctttcctgacaagaccgtaacctcgttcatattg

SEQ ID NO: 1076 - DNA, 536 bp, Homo sapiens
gacctgctgcttaccccataccccaggctggctaccaagggcctccgggcccctatccagggccccaacctggctacccagtcccaccaggaggttatgcaggtggtggccctagtggctttcctgtccaaaatcagccagcatataatcatccaggtgggcctggggggaccccatggatgccagccccccctcctccactgaactgtccaccggggctggaatacttagctcagattgatcagcttctggttcatcagcaaattgagcttctggaagtcttaacaggctttgaaacaaataacaaatatgaaatcaagaacagcctcgggcagagagtttactttgcagtggaagatactgactgctgtacccgaaactgctgtggggcgtctagacctttcaccttgaggatcctggataatctgggccgagaagtcatgactctggagagacctctgagatgcagtagctgctgcttcccctgctgcctccaggagatagaaatccaggctcctcctggggtaccagtaggg

SEQ ID NO: 1077 - DNA, 560 bp, Homo sapiens
  misc_feature (1)...(560): n = A,T,C or G
aactgaggacaggttgcttggaaacgagctgtcaaaggagttagagaaatgtgtgatgtgngtgacacaaccattttcaacctgcactgggtgtgccctcggtgtgggtttggagtatgngtagattgctaccggatgaagaggaagaactgccaacagggtgctgcctacaagactttctcttggataaggtgtgtgaagagtcagatacatgagcctgagaacctgatgcccacacagattattcctggcaaagccctctacgatgttggagacattgtgcattctgtcagagcaaaatggggcataaaggccaattgnccctgctccaacaggcagntcaagctcttctcaaagccagccttaaaggaagacctgaaacagacatccttgtctggagaaaaaccaactcttgggaccatggtccagcaaagttcccctgttttggagccagtggctgtgtgcggggaagcagcctccaagccagccagcagcgngaagcccacctgtcccaccagcacttcacctttaaactggctagctgaccttaccacatgagg

SEQ ID NO: 1078 - DNA, 457 bp, Homo sapiens
  misc_feature (1)...(457): n = A,T,C or G
gcagcttgatggtaccaangcattnctcacttgcggcagcntctgtgaactgnctccggcatgagcgtccatgatgtgcacccgtgcttgattatcctnntacgccagnggnagagagagctgggangcatgtgnataaantntcttgggcccttgacagagatccatggaaggggtgcgttcaggcagaccagcagctcatggaaaagaccaaggccaaggtgttctctgcattcatcacagtgttacagatgaaggagctgcgagtcggtgatatcccccagtactcccagctggtgctgaacgtctgtgagactctccaagaagaggtgattgcactctttgatcagacccgccacagcctggcatccgacagcgctgccgaggacaaggacagcatggagacagatgactgcccctcggccccggcacaaggaccagcgtgatggggtgaccc

SEQ ID NO: 1079 - DNA, 213 bp, Homo sapiens
gaggatcagggtatcgttgatgcctaccgtcaagccctgccccaagttcgtctctatggccccaccaactttgcacccatcatcaaccacgtgaccaggtttgcagcccaagctgcacagcagaggtcggcctcggtaagagctgtggacggcagtggtgccaagctggcaggaccgtgtagagggcatcttggcagtgggagtgtgcacctg

SEQ ID NO: 1080 - DNA, 402 bp, Homo sapiens
ctgcctccaaggccatgaagatgggcgactggaagacctgccacagtttcatcattaatgaaaagatgaatgggaaagtgtgggaccttttccctgaggctgacaaagttcgcaccatgctagttcggaagatccaggaagagtctctgaggacctacctttttacctacagcagtgtctatgactcaatcagtatggagacactatcagatatgtttgagctggatctacccactgttcactccatcatcagcaagatgatcattaacgaagaattgatggcttccctggaccagccgacacagactgtggtgatgcaccgtactgagcccactgcccagcagaacttggctctgcagctggctgagaagcttggcagcctagtggagaataatgaacggg

SEQ ID NO: 1081 - DNA, 146 bp, Homo sapiens
  misc_feature (1)...(146): n = A,T,C or G
ctgctgtatttgtttgccttgaaaatnctttaccccaaaacactgtttttacttcgcggaatccatgaatgtaggcacctcacagagtatttcacgtttaaacaagaatgtaaaataaagtattcagaacgcgttaaaaaaaaaaa

SEQ ID NO: 1082 - DNA, 437 bp, Homo sapiens
  misc_feature (1)...(437): n = A,T,C or G
gactgaggagaacaggggagatcaagtcagaagtccgagaacagatcaatgcaaaggtggctgagtggagagaggagggcaaggcagagatcattcctggggtgctgttcatcgacgaggtccacatgctggacattgagagtttctctttcctcaaccgggccctggagagcagacatggcgcctgtcctcatcatggccaccaaccgagggatcacccggatccgaggcaccagctaccagagtccccacggcatccccatcgacctgctggaccgcttgctcattgtatcaacgtcaccctacagtgagaaggataccaagcagattctgcgcatccgctgtgaggaggaagatgtggagatgagtgaggacgcctacacagngctgacccgcattgggcctngagacctnncctgcgctatgccatccactca

SEQ ID NO: 1083 - DNA, 292 bp, Homo sapiens
  misc_feature (1)...(292): n = A,T,C or G
cttaccacgtgcacttgtgcttttgaccgtggcctggagatgaagaccatattggcngagaatgatgaagtcaaattcangtcctantgcccaaagcacagnntcacacaggaaacccgaggagggcctgggcgaaggagcagnccaggagaanggggccnctgagagntctnnccagagccctntggagccctatgntagtctggaagcccgagncgagaggaggcccancgnntganttgttcncnagcagaancctncngcagcatggaggatgagttctacacctttg

SEQ ID NO: 1084 - DNA, 226 bp, Homo sapiens
  misc_feature (1)...(226): n = A,T,C or G
tcacggagccatgaaccagcagcacatgatgccttcccaagccttcccgatgcggcgccctctgcctccagatgacatccaggatgactttgattgggattcaatagtgtaggcttgtttctgcaaganannaaactccaggatnctttttgttcagtgaaaggacggattanaggcccggttgagaaaacaaagctatgttaccagngctatctaaattcctttc

SEQ ID NO: 1085 - DNA, 507 bp, Homo sapiens
  misc_feature (1)...(507): n = A,T,C or G
tgaggcctggttgcttgttacccaggcaacggacaggctatgtccgtcacgttgataacccaaatggagatggaagatgcgtgacatgtatatattatctaaataaagactgggacgccaaggtangcggaggtattcttcgaatttttccagaaggcaaagcccagtttgctgacattgaacccaaatttgatagacttgctgtttttctggtctgaccggcgtaaccctcatgaagtacagccagcatacgccacaaggtacgcaataactgtttggtattttgatgcagatgagcgagcgagagctaaagtaaaatatctaacaggtgagaaaggtgtgagggttgaactcaagcccaattcagtcagcaaagacgtctagtggggccttgggtccggcagtacccacgtcacctacagcctctcagttgccttctgtggactcgtggacaggatggacagagagacacctgcctggtatttcagctgggagccaggcgacttc

SEQ ID NO: 1086 - DNA, 376 bp, Homo sapiens
  misc_feature (1)...(376): n = A,T,C or G
gaacatggctgaggcacaccaggcctcgagcttgctgtcttcactgagttccgatggggcagaagtagagctcagctcgccagtgtggcaggaaatttacctctgtgccctgcgctcctgganaaggcatctctggcgtgtctgggtgaggagaactattggcctggtttccttctgggaattcagatttcggggcttcctgaaaccgattctgaagatatggatgtccagncccaggctacggttaactatggcttcctctgggatgctctgtgctgcccactggcctgccctgctcagcatccagactcactccactcccctgctgncctccccatgcagctcctcccccaataactttagtatagtcttctta

SEQ ID NO: 1087 - DNA, 309 bp, Homo sapiens
  misc_feature (1)...(309): n = A,T,C or G
cttctctgatctgtttccaggaagcatggatgnngccttncgnncgatngaagccagaaatgcngccatngccaatcactgcttcacctgtnctctcaaccgtgngnancagctnaccatgacctcggntacttntatngntcgagctatgtggnagntccctatggcagccggacccncggcctctcccgtaatcaggatggnctgctgnccacggagctcaacctcaatctctgccagcagatcaatgatttctggactttcaagatgacgggacgacttgagatgtatgcccggcaacttgccgaa

SEQ ID NO: 1088 - DNA, 209 bp, Homo sapiens
  misc_feature (1)...(209): n = A,T,C or G
actgagtgggcaagcaccgagttgaccggccaaaggagngactctgatgccgaagctcaaggaaagccctcagacgtctcccttacctcatctgtcacctccctcgactcctcccctgtcgacgtagcgtccaagaccaggaagtcatacaatagaattttttgaaatgtgtgcaaatctaattaaaattcttgcacagtaaacctaaa

SEQ ID NO: 1089 - DNA, 357 bp, Homo sapiens
  misc_feature (1)...(357): n = A,T,C or G
ccttagtggatgataatggtagtgaggaagacttcttngtatgaggagctntgncaggccaaccctcggtacctgcagccaggaggggaacagctggccatcaatgagctcatcagctgatggcagcagtggtctgtgcagaagcacttgtgggaccatgtgaccatggacgaccaggagctgggcttcaaggctgnttttntnatncaagntcnggaagcttctaacaaggactggtggtggggccggaatgaagacaaagaggcctggctccctgcaagntttgttaggcttccagcccnatcangaggagctgcccgagaactgcagnagctccccntggggaagagcaggatg

SEQ ID NO: 1090 - DNA, 530 bp, Homo sapiens; identical to SEQ ID NO: 43

SEQ ID NO: 1091 - DNA, 249 bp, Homo sapiens
  misc_feature (1)...(249): n = A,T,C or G
cgccccagtctccaaagcaaaaccacatccctttttcctatcanaaatggttccaaagagaatgggatccatgaggaccaaggccaccagncnctnnctttgtnncgctnnnttcatatgcactgatctttntactggatggacnctaacctgaagcccnctgccttgcatgancntatactnttcnnttttgcgcccncangacaacaatgtntccagannacctctaaccaagcatattgaggagcg

SEQ ID NO: 1092 - DNA, 143 bp, Homo sapiens
  misc_feature (1)...(143): n = A,T,C or G
atgaccccattccagagaatgcgcgaaaccactntgaaggggcgcacagccatggagaagggccctagggggactctgaggagggacttcantcacataaacgtggagnntgagtcnatnttgggaagaagaagaaaaggttt

SEQ ID NO: 1093 - DNA, 546 bp, Homo sapiens
gttccttgatgtaagccagctgtccttcatccatgatctgggaccaaagggcctggaaggaatgatcatgaaaaggtctgggggacacaggataccaggtgtgaattgctgtggccatggacgagcctgctaccggtggtcaaagaggtggttgatagtaaaagactctttcctgctctatatgaaaccagatagcggggctattgccttcgtcctccttgtagacaaagaattcagagtcaaagtgggaaggaaagagacagaaacgaaatatggacttcggatcgataatctttcaaggacactgattttaaaatgtaacagctacagacacgcccggtggtggggaggcgccatcgaggagttcatccgaaagcatggcgctgacttcctcaaagaccatcgcttcgggtcctacgccgctctccatgagaacacgttagctaagtggtatgtgaacgccaaaggttactttgaagacatcgcaaatgcaatggaagaggcatcggaagagatttttatcacagattggtggttagtattgcc

SEQ ID NO: 1094 - DNA, 332 bp, Homo sapiens
  misc_feature (1)...(332): n = A,T,C or G
gactgagaagtctagggagttggagtggaggtgagcaccgcgatcgcgaaagccctggctccctccgtccccgtcttccgccgatcgctctctgatnagttcctatccagcagcagatngaagcnggagatganatcttctcaaggtttgtgtnagnagcttnacgttctaggcagaaggcttcatgaaccaagtgaccgtnaaccaacaaggcttctctctntctcctcnctctaacaatgaaagntgctggtaacaagggaaaaaagagcgagagaattgtttataccatttcagntccaataatanatgacctatcagctctaaaagga

SEQ ID NO: 1095 - DNA, 270 bp, Homo sapiens
cactaaccgacagctaggcagtatggtggaaatcgccaagcagctccagacggtcaagcggaagatcagagatgaaagcctctgctcccagcaccacgaacctcttagccttttctgctatgaagaccaggaggctgtctgtctgatatgtgcaatttctcatacccaccggccccacaccgtcgtgccgatggatgatgctacacaggaatacaaggagaaacttcagaagtgcctggagcccctggaacagaagctgcaggagatcac

SEQ ID NO: 1096 - DNA, 524 bp, Homo sapiens
  misc_feature (1)...(524): n = A,T,C or G
actgagggatagagaaggctgngtnaggctganggactccgtcgatgggctccagtgtctgaccatgactgcggaaaacccaccctctggagacctgattcccgccccgctcgncacttgcaagctctgcctgtgngaacagtctctggacaaagatgaccatgctccaagagtgccagcgtntcttttgtacaccctgcctgaaacagtatatggtgctgncaatccgagaaggctgtggatctcctatcacttgtcctgacatggngtgcctaaaccangggaccctgcaggaaaccganatngcctgtttggagcctctggatgagtttcagctgtatcagcggctcaagtttgaacgaggtacacactcttctgtttatcccggtggcgaatgtagctttgacgcagaccgtctttacacgagcttcatgaaagattaaggccactgtgggctgtcgacagaaccacaaggggactgcaaggagtggaaacagcaattggcacatccgatgtcaactcct

SEQ ID NO: 1097 - DNA, 251 bp, Homo sapiens
tgagggaaaatgaccgagttgcaatggttaacggagtttcaatggataacgttgaacatgcttttgctgttcagcagctaaggaagagtgggaaaaacgcaaaaattactatccgaaggaagaagaaagttcagatccctgtaagtcacccagatcctgagccggtgtctgataatgaagacgaaaatgaatgtcacatttctttttcctctaatatatctattaaaatcttacaaattataaaaaaaaaa

SEQ ID NO: 1098 - DNA, 511 bp, Homo sapiens
tgaggcttgagcagcacaggaacaggagaagctggagcgggagatggcactgctgcgtggtgccatcgaggaccagcggcgacatgctgaactgctggagcaggctctgggcaatgcacaaagccgtgccgcccgggctgaagaggagctacgcaaaaagcaggcctatgtggagaaggtggagcggctgcagcaggcactggggcagttgcaggctgcctgtgaaaagcgagagcagttggagctgcgtctgcgcacgcgcctggagcaggaactcaaagccttgcgtgcacagcaggtaagcccagaagacctgtgcagctggcagtaccgggcacaattcaaagagtccctccctgctctctagtctttgtcctctttgaaagatgattgcttcatgttccccttggcgctgcttggtccctctcaggtgctttgtatagcaaaggctctgcctcgagccctactgtggctaataacagaaatttggtaccttagtaccagtcagtaa

SEQ ID NO: 1099 - DNA, 298 bp, Homo sapiens
  misc_feature (1)...(298): n = A,T,C or G
actgagaggagccccaggantgcttatnggttggctcagcagcctttacctcactgtgnagtnccaccgngcagnccntgcgctncgngcactgcaagctgnacnnatngnntgaagcttgcccgataccttgcatnctagatgccacatatgcntgcnnaagagcaccagcaggcctntggacatccttgncatgnaggagccaattaacagaaggctntttgagaaatacntgaaggatgacantggntcgagagacccttccagtgactgggagatgtnacagtcttccgtgaga

SEQ ID NO: 1100 - DNA, 213 bp, Homo sapiens
gactgaggctgcatttgccgcagctttacaacgtcttctgctctgctgaccagaacccatattaattatggcgtcaaaggggatgtggcagttattcggattaactcacccaattcaaaggtacttgaactttctttagttaatttctaccaactacagttatgagtcgtatcctacatagaaataaaatctccctgacttgaaaaaaaaaaa

SEQ ID NO: 1101 - DNA, 512 bp, Homo sapiens
gactgagggcgctgtgaggttatgcgcatgcttctagctgaccagggccagagctggaaggaggaggtggtgaccttggatgtttgggagcaaggcacattcaaggcttcctgtttgtttggacagatccccaagttccaggatggagagctcaccctgtaccaatccaatactatcctaccggcacctgggccgctccttcgggctctatggcaaagaccaacaagaggcagcactggtggacatggtgaacgatggactggaagacctattcagacgcattgcccggcagtatcgccatatcctgaaggagggcaaggaccagtatcagaaggagcttccgggacacctgaagccatttgaaactctcctggcccagaacaggggtggccagtccttcattgttggtgaccagatctctttcgcggactaccgcctgctggacgtgcttctgaatctcgagctcctgtttcctggttacttgaatgactttcccctgttctaatctccaa

SEQ ID NO: 1102 - DNA, 178 bp, Homo sapiens
  misc_feature (1)...(178): n = A,T,C or G
gatctgagaggcaaggtcggtgaaatggaggcctcggngatattgcccattctgaagaagaagctggccttcctttcangaggaaaggacagacncanctggactcatcttgacaattncgctgggccttgancagacaagnatggatgagcatgagtgtcactttggattatctact

SEQ ID NO: 1103 - DNA, 493 bp, Homo sapiens
  misc_feature (1)...(493): n = A,T,C or G
gactgagggtcgcccaaaccgtaggtgcgggacaggttcgcctggagctgagctttgtcaactcagacctgcagatgctgaaggaggagctggaggggctcaacatctccgtgggagtgtaccagggcaccgaggnagcagancancanntcttngattcnttttgnncnnnaggngaccatgcgaagtangatnntncnntcgnacttcnnccgaaatgtcaaaccngggaggctcatagcagaagaanctgaagtgtgacttatgngnctgcagtgtctttaggngccacgactcaaatgtcaactgacgtttgcaaggtgaccctgggacctcacttggccacttacaaggagatttttgtgtattcgctcctctgaaactcttcctgtgtntctgatggcttctgacaccctttcattgtgccggggatggaaccgggatcttgggtgtgcggggcaagtgctctacagngacctatgttcttgtctgt

SEQ ID NO: 1104 - DNA, 507 bp, Homo sapiens; identical to SEQ ID NO: 44
  misc_feature (1)...(507): n = A,T,C or G

SEQ ID NO: 1105 - DNA, 461 bp, Homo sapiens
  misc_feature (1)...(461): n = A,T,C or G
tgaggtgacccaggcaatagtttcttcaatcggcctatgtcgctatggaggcaggattgactgctgctggggctgggcccgccagtcctggggacagtgccaacgactctagactggtccagcactgaccattgttggtagtgttttgggtttcttcctttacccttcattgaactggatattaatgcatctccaagggaaatggctcaggttttgtggttagttcttgttgctattgacgaccacagcagccacgcaagaagacagagccacggaagggaagaagacaaactttaatgtgtttttctcaaagctggagagaaaagggaacgtgtggcttatgagaaaaaaaggtaagtgaatggtcatgacgtacgagctaccagcctgggtacggattgagccaaagttggtcacttttttttttncacntgctttatccaaaattgattaaaaaaaaa

SEQ ID NO: 1106 - DNA, 516 bp, Homo sapiens
  misc_feature (1)...(516): n = A,T,C or G
gaggcctgtcctcatagagatttccagcaccccaaggaanctcaatgagactcttgatgaaaatttcaaaaaattccataaggatattatccatgagctggagaagaagacagaacttgatgtaaagtatatgaaccgctactcttaaaagatatnaagcagagcacaggaatanattaagattctttgnagaaatctcaggcaggagctgaagangatcagaagaaaaagtcaaggtggacgaaacgcactcaaatacgagcacaaagaaattgagtatgtggagacggngacgtctcgccagagtgagatccagaagttcattgccgatggctgcaaagaanccctgcttgaggaaaaaaggcgcttntgctttctggtggacaagcactgcagctttgccagtcacatacactactatcacatgcagnctgcagagttacttaattccaagctgccccggtggcaggaaacctgttgtgatgccacaaaagtcccagagaaaatcatgaacat

SEQ ID NO: 1107 - DNA, 531 bp, Homo sapiens
  misc_feature (1)...(531): n = A,T,C or G
actgaggcttagccggcacgggctaaggccctggtgctgntcaccgtgccgnagcatccaaaccctgcatgtgctcagnggagatatgagtcagctgccggctggagttcgagactttgtggcgcgcagngcgcatctgtgccaaccananggcatccacatngtgncgatggnaccgaggcatgagaacactgncatacatggnccatgctggaagaacagngctcttatccgcaaactccccangnatnagaactgngtggcgtggccctntcagacgcccaannntgtngnacnntatagaaagcaagcananntgattganangtccttcgcatggngncacagagcctctcctggctggctggggccagggcannagctgggcancnggatgnncccagangancnccatnagtagctgcngacgattagattacnangatgcatgcatggnctgcattatgtntgngnttccattnagaatgnagtcccgtgggctcctccactctcccgtattggagtgcgaat

SEQ ID NO: 1108 - DNA, 229 bp, Homo sapiens
  misc_feature (1)...(229): n = A,T,C or G
gactgaggaatgtatcctgtcggggntaatgtcagtgaatgggaagaaggttcttcatatggatcagaacccatactatggaggagaaagtgcgtctataacaccgctggaagatgtaagtctctgacgcacacgcttacatgttggctcatttgggactgtccacttttggactcgctcttggttttggcttcctattactatatttttttgtagggtaggaggaggg

SEQ ID NO: 1109 - DNA, 164 bp, Homo sapiens
gactgaggttttgtccaaggatccgaaccactttgcagtctacgtactgtgacaccagtgcccagcccacctgtgattatggatatggaacttggaactctgggacaaatagaggctacgagaactatggttatggctatggctatggccaggataacaccacc

SEQ ID NO: 1110 - DNA, 520 bp, Homo sapiens
gactgagataccctattttagtcttatgaagattttaatgtctgcctccccaactatgcatagtatatcacagtttcatcaaaggacaccagcaatgtgcagttgtcgtcaaactcagagtggtgagaaatacagtgatccttttaaacttggctggagagacttgaaaggtctgtatgaagacattagaaaggagcttgcacatctccaccagagaactaaaggacatgtccgaatactacttcgatggcaaaggaaaagcctttagaccgattattgtggtgctaatggcccgagcgtgtaatattcatcataataatgcccgagagatgcaagccagccagcgctccatagccttagttgcagaaatgatccacactgctactctggttcatgatgacgttattgatgatgcaagttctcgaagaggaaaacatacagttaataaaatctggggtgagaaaaaggctgttcttgctggagatttaattctttctgcagcgtctgtagctctggcacg

SEQ ID NO: 1111 - DNA, 351 bp, Homo sapiens
  misc_feature (1)...(351): n = A,T,C or G
ccatggcaaccgagagctggatgantattttacacttngccancngatcagatggnaatcatagacggtattgatccgagagatgaggcanatggnccagaagacctcaatcggacctgtattgatgaaaagctaggtggcgtccttaatgtgtngcnctttgaaggatccttgtgtgtngancagncagtnantgccacnagttganagntngnatactgaacactatcctttcactatataagtaaagcaantatattaggccaggatctcactgaggaatttgtnttgtcatcttttagagtaaactaaaaattgtatagncgtctgcncacactaccctacctaaat

SEQ ID NO: 1112 - DNA, 201 bp, Homo sapiens
  misc_feature (1)...(201): n = A,T,C or G
ctttcatggggcaggnaaggaaagccaatgcgcangtgtnccancattcgaccaggagagactggaatggatgtaacaagccggtgnacccttggagaccccaacaagctgccataaggggttncccaacctgctcgcatgccctatatttnagacaagcaccctaggnaaaccttggaagtgatcaaccttttgagaaag

SEQ ID NO: 1113 - DNA, 517 bp, Homo sapiens
aactgagggatatacatcagaagaaaccaaaagccagctggaatagttcctggatgagattttattcctgtttgcagttgttttgaggggggataccctctggatcagaattaaaatgctctggtttcaaggaaagagcctgcagattgccaaatcctcctttggactcttgagaaatctctctgcctctaacagagctctgcctgtgttgaccttattcacaaaggccccatgcccgctgtgtgatgaagctaaagaagttctccagccgtataaagacaggtttattttacaggaggtggacatcacacttccagagaattctacttggtatgaacggtataaatttgacatccccgtcttccatttgaatggccaatttctgatgatgcatcgagtaaatacctcaaagcttgaaaaacagcttcggaaacttgagcagcaggtgctggctacaaactgatattttctcattgatgcaagtacccagatgagaagtttacttctaggcatcttg

SEQ ID NO: 1114 - DNA, 178 bp, Homo sapiens
ctgagagtatcatggccttaggcacacagctgatgcttctgctgtggaaaaattacacctatcgacggagacaaccgatccaactactagtggagttgctttggcccctcttcctcttcttcatcctagtggctgtccgtcactcccacccccctctggagcatcacgaaaaaaaaaa

SEQ ID NO: 1115 - DNA, 115 bp, Homo sapiens
  misc_feature (1)...(115): n = A,T,C or G
cttccaaaatctgaacacagaaatatgtgangagccncatccgcgccgttccccatgaccgccggctgnagtacacagagtaccaacagttggagggttggcggtggagtgtggc

SEQ ID NO: 1116 - DNA, 466 bp, Homo sapiens
  misc_feature (1)...(466): n = A,T,C or G
tgaggacagtgatggggacaagagtgatgacaacttagttgtggatgtgtctaacgaggacccttcttctccacatgcaagccccacacactcaccccgggaaaacggaattgacaaaaaccgtctgctgaagaaagatgcttcaggtagcccagcatccacagcctcctctggaagttcctcttccctgaaatccaaagaagtgagcctgcatgaaaaagccaacactcctgttctgaaatccagcacaccgacgcctcggagcgacatgccaaccccaggcaccagcgctactccaggcctccgtccaggtctcggcaagcctccagccatggaaccccttgtcaaccaagcaggncannacccnttnccctactgtgctttgtttnttctgtnccagtgttgatgtgctgnctgctaatctnntgacagttagcccctgaatgtgaagcaccttggcgctgtt

SEQ ID NO: 1117 - DNA, 132 bp, Homo sapiens
  misc_feature (1)...(132): n = A,T,C or G
gggatgacagtggaactgttgccccccggcggagggggcagnaggctnngcccttctgcgctggtgggcctggctcttggggtaccagctgctccttccttctttctcatgttctaaatggaaaagaagagt

SEQ ID NO: 1118 - DNA, 512 bp, Homo sapiens
gattgagcctctaggtcgccatggcaactgggcagaagttgatgagggctattcgagtgtttgagtttggtggaccagaagtgctgaagctccagtcggatgtggtcgtgcctgttccacagagccatcaggtcctaatcaaagtccaccgcctgctggtgtcaacccagtagagacatacattcagctctggggcctacagtcgaaaacctgccctaccctacactccaggctctgatgtggctgggatcatagaatccgttggagacaaagtgtctgctttcaagaaaggcgacagggtcttctgctacagcaccgtctctggtggctacgcggaatttgctcttgcagccgatgacactatctaccccctgcccgagacactgaacttcaggcagggggctgccctggggatcccgtacttcacggcctgccgagctctgttccacagtgcccgtgctcgagctggcgaaagcgttttggttcatggggccagtggaggagttggatta

SEQ ID NO: 1119 - DNA, 252 bp, Homo sapiens
  misc_feature (1)...(252): n = A,T,C or G
atttgaggatacactattatcagcctcnggccctggnanaaacatgcagacagcatcctggcactggcttcagtcttctggtccatctcttattactcctctcccttcgccttcttctacttatacaggaaaggttacgttgagtttgtccaaagtggtgccattttctcactatgccgggacattgctgctgctacttgcaggggtggcctgcctccgaggcatcggccgcatggaccaacccccagtacc

SEQ ID NO: 1120 - DNA, 199 bp, Homo sapiens
  misc_feature (1)...(199): n = A,T,C or G
gactgagggtttttaacatgttcctgagcatcgaggntcaattctgtcaatgtacggaacttccttacctgggggagcaaacaggaagaaaggaatttgggaaacatcactgcatagtccagcatccctttacagtgttagcactgccctccaccacactgagttcaatgaagaaaataaagcgacaacatagattata

SEQ ID NO: 1121 - DNA, 367 bp, Homo sapiens
  misc_feature (1)...(367): n = A,T,C or G
ctcctttggcatctgtgnggtgaaggatgacactaaaatcagcatcgaacctgatggagctctgcaatgtagcatgctccagtgtgatgccaggagggggcaccaacctggagcttgccctgcacatgcctgcatgatgcccagggcagtgttcaggttgccctggagactctgttactcagaggaccccagaagccccggactcacccactggttgactatcgatacacaggntcagacatttggacccccatggagaagaggctcttcaagaaggcattctgtgcccacaagaaggacttttacctgatacacaagacgatccaaantaaaagtgtagcacagcgnaagcgagtactactacatc

SEQ ID NO: 1122 - DNA, 180 bp, Homo sapiens
  misc_feature (1)...(180): n = A,T,C or G
ggacccagggccagttcgcggagctgtcggctgcgaggacaccgcttccctagagcccggcacggaggccttgtggtcaccagccacaggctccagatagctcgacccacctttgctgggcgaaagaggtgtgggcgttcatctgcccattacgggntgagaaggtgaacgaaaaaaaaa

SEQ ID NO: 1123 - DNA, 295 bp, Homo sapiens
  misc_feature (1)...(295): n = A,T,C or G
aaccctcgaagacttcaggcacacattgaacagtggnacngcggaaggcagacagccttcngngacacctcattcctgagtcngncacgggggcggtccgcctcccgagcctggagccccactcgggngnggccccacattctgccgttccacnctgcagccccacagncccctgtgtncttgtgcctttncctgcggaccngntgctgtntttccaccctggacctggnccccctctatgctggacgnggngttaggccgtnattgggacgccggagcgcagcgagaacaccag

SEQ ID NO: 1124 - DNA, 308 bp, Homo sapiens
  misc_feature (1)...(308): n = A,T,C or G
actgaggacccagcctcgatgcccacttgaaaggccggaagcaccgggatttggtgcaactccgagctaccaggaaggcacagggactccgaagtgtgtttgtcagtggcttccccagggatgtgggttctgctcagctctctgagtacttccagacatttggccctgtggccaatattgtcatggacaaggacaaggtagagtgaatggctctgggattaatgtgtttgcttnatatgcagagagagaaacctgcagtctgttttggcttgcccttggtagacaattcagaacattaagtagctcag

SEQ ID NO: 1125 - DNA, 417 bp, Homo sapiens; identical to SEQ ID NO: 45
  misc_feature (1)...(417): n = A,T,C or G

SEQ ID NO: 1126 - DNA, 421 bp, Homo sapiens
  misc_feature (1)...(421): n = A,T,C or G
gactgaggtggggtctttcaatcctagtcgactatgacgagaaaggctacctcctacagatcttcaccaagcccatgcaggaccggcccacactcttcctggaagtcattcaacgtcacaaccaccagggctttggagcagggcaacgttcaactctctgttcaaggcgttcgaggaggagcaagccctacggggcaacctcactgacctggagcccaatggngtgaggtctggaatgtaagcccctatccacacatggaccacgcaaagtgctggacacatcagtcatctccaactggctgaaaggctgaacctcagggctccacccacgtcatggccacaccccctctattacaagagtccgccttgcctgagtcctccctgctgagtaaagctaccctcccaggtccaaaaaaaaaaa

SEQ ID NO: 1127 - DNA, 408 bp, Homo sapiens
ctgagcaaagcatcccaggttgtcttcaccaatggggaagaaataactgtggagcatcccgatatgaaacaagtttactcttttatttacgatgtttccttttggtcttttgatgaatgtcaccctggctatgccagccagacaactgtatatgagacactagctgcaccactcctggacagagcttttgaaggctataacacctgtctctttgcttatggccagactggctctggaaagtcctatacgtaagtaatattggtcatatgactaactaaacacgtttataagtaatatcggtcttataactaactaaacacgtttatgttttctttcgtcagaaacctcatggttgtagaaagaataccactgttgttttattaaaatttacaaactataaaaaaaaaa

SEQ ID NO: 1128 - DNA, 109 bp, Homo sapiens
  misc_feature (1)...(109): n = A,T,C or G
tgccttgatgcagtggtctgtgaaggtggcaatgacatctcgccacaacggngcnttgttgagtgaccgaaggatctctgncatggagcaggnccagcccaggcccact

SEQ ID NO: 1129 - DNA, 178 bp, Homo sapiens
  misc_feature (1)...(178): n = A,T,C or G
gactgagggacttctcccaatgttgcccgtaatgccattgtgcaactgtgctgagctggtgacctatgacctcatcaaagatactctcctgaaagccaacctcatgacaggtgtgttagcgccacattnaagctggtagggggccgtctagttgtctaaagactgcatcttgttaaaa

SEQ ID NO: 1130 - DNA, 317 bp, Homo sapiens
  misc_feature (1)...(317): n = A,T,C or G
ctgcacttgctgaacgtaacatacatgaagnncatcgagntntgcngagccgnntntgagaacaatactcnaacagaacagganggccntgctcctgcccgacagcntatctacacngaaangnactgnccaatctgatnacatnaagcctnctttnctgttganacaaactgtggacatctnttttgtggtncctgcataattgcatactgncgatacgggtcctggcttggtgcaatnagttgtcctatctgtagacaaacggtagtgttctntagatataaagtancacttatggtatttcatttcataaatat

SEQ ID NO: 1131 - DNA, 490 bp, Homo sapiens
  misc_feature (1)...(490): n = A,T,C or G
ttgcaggtttgctccagctcngccgggccatctcccagngatgtcnccgtcccagatccactcagncccncgatggtgctgtctnaaggattcctganccttctcacctggnaccctgagaatgaatagtttcctgaaaccctagngncnnacagaccccggctgcaggagcctggagtcgcagnanangcanctaaccatccttgcctctgtcttgntggtggccaggagcttctctgacagnggnntgtttagctcaccccagttcgtagacaagctgaaacnaancacgaagtccctggtggaggatttcaactccaggcccnaggaagtgatgcngtcagngagtgagcangtggtggaggaagtncaccagggtctcgngagcatggggttgancgctctgagcagcnagaatacggggtccntgnngnnccagntncagaacattgccaagaaggaaaactgngtccgcagcgtcattgaccag

SEQ ID NO: 1132 - DNA, 549 bp, Homo sapiens
  misc_feature (1)...(549): n = A,T,C or G
gagagccccaccacctgccccctgcggaaacacaggtaccatccgggaagccncgcacacgcctnnaccacatcgccanctnctannctngnagctgcanganccagacagaaacngtacctgtaccatancnagancaggtacttgagttngtccagctctctgaaccttacnnagacccaaggtcnaantcanggntccagaacctgaagggcttagangcagaaaagactgcaagaggcaggaactggaaaagctgaaaatggctgccaagcctatgctgccctcaggcttcagtctgcccttccctatcaactcacccctgcaagcagcatccatatacggcgcatcctaccccttccacagacctgtgctccccatcccgcctgttggactctatgccacgccggttggatatggcatgtaccatctatcctaaggaagaccagatggaccagactccaggatggatgcttgcataaaagcatccccctccctctccgagaaggtggtgccaactctgctcctgaatgcgagccttgcattgtc

SEQ ID NO: 1133 - DNA, 454 bp, Homo sapiens
  misc_feature (1)...(454): n = A,T,C or G
gccgagatggtgctggagacactcatgatggagctggctgngcagatgagagaggtggagctggnatcagagggagcngtcncatccgcantcaggaatatcatgcactggtgtggacatacagcatggttggnaaacacgcccagncccnnctatgacatcagccctggtgagcggctgcagttggaggatgtatgtnccaagatccacccatcctactgngggcctgccatcctcaggttcaggcagctgctggctgaacgagagcccgaggtgcaggaggnggcgcggctgttccgctccgtgttgcaggaggccctggagaagatgaagcaggaggaggaggcccataagctgacacgttagngnagctngaggccccgnggnannctgncgtgcttcaagacccgcgntcgcatagtaccctttgccagngacatacgaaccatctagg

SEQ ID NO: 1134 - DNA, 518 bp, Homo sapiens
  misc_feature (1)...(518): n = A,T,C or G
gactgaggtgggtgtctttcnagcagaagagaagagaagagaagagangagangagaatagaagagaagagatgagangagangagaaccagaagaggtgagcgagnancctnacacaaagccaggncgtcancctgctggccaagggcctgnagacaccggccttcccgttccaggctacgagacagtgccagcatctgccgaggacggtgaaggctctgatgggcccggaggcaaggtgaccgacgnctgctggtagcccgctgcaccggctgcgctcgcctctacattngngtccagnctccccagccagtggatctttctgcctggagcccccgngcttgaggcgcagtctggatgaggacgaaccgccgccctcgccantcgntcggtaccggcccctgcacaacgccgcctcgcatgagggcctggccgncacctncggctcgccaccacgctctgcaccctcctncgacagctnccccagcttcgngcgtcgttaccctcgagcagagccg

SEQ ID NO: 1135 - DNA, 180 bp, Homo sapiens
  misc_feature (1)...(180): n = A,T,C or G
cttttggggtctgttccgagccagtgatcaaagacaatgtggtggtggtgtacgaggtgttggaagagatnctgnacaactgggttnccnttgtctacggagtcaaacatcctcaaagaactgataaancctcccactattnttcgnacagtggtcaacaccatcacaggaagcaccaat

SEQ ID NO: 1136 - DNA, 393 bp, Homo sapiens
  misc_feature (1)...(393): n = A,T,C or G
gactgaggtgactgggggcctgggcctgtcagnggggatctacgcagaggcagagcggnagaaatacaaaacntctggagagngccttnctggcccccgccatcatnctnatcctcctgggggnggtcatgntcatcgcctncttcatcggggtgctnncttccctccgnnacaacctgnnccttntgcanacgtttatgtntatnctgnngatnngnntggncatggagcttattggngncataggggntttgatcttccggaaccagactattgactttctgaacgacaacatccggagaggaatcgagaattactacgatgatctggacttcaagaacatcatggactttgttcagaagaagttcaagtgctgtggcggtgaggactaca

SEQ ID NO: 1137 - DNA, 415 bp, Homo sapiens
  misc_feature (1)...(415): n = A,T,C or G
ccccgggctccccgcttacgntgtggcaggggncntanntgntnantcgaggacnnncgtgcgccgctgggacgacnggctccatgcnnctgctcatgagattattganactatccaggtgggtctgngaggaaatcccagatctcaagctggccatggagaactatgtcctgatcgacttaccgacacncaaaagtttcagnaagcatgcntngggtgtgtgacnannacaagcgnnccatcnacagcatncaccagctgngnaaggccactacacagcccatgaagctgantactcntacgtgcaatggacttctgcngcacatcctgcagataagcatataaccactctgtcactgacccggagaagcttancaactacnagcccttctcccntgnggtgtatggggagacc

SEQ ID NO: 1138 - DNA, 296 bp, Homo sapiens
  misc_feature (1)...(296): n = A,T,C or G
acacttacacgagtgcccccgcctattcttcccaggccatcccagtcagacaggggagcaacagctgnaaacacgttctcagacctgcattacagctcattttcttntggntatggagcctacgganntncattntatggaagctatancccttatagntatggatacaatggttggggctttaaccgcctccgtgnagatgatcttcctcccagtgnggtttgttcagcaagctgnaganagccgcacaggngcatttgagnccattgnaagcattgcncatgcatttgcctctg

SEQ ID NO: 1139 - DNA, 457 bp, Homo sapiens
  misc_feature (1)...(457): n = A,T,C or G
gactgagaggccagtatgaggaagctgtggtggatcanggtgggaccagcacaattctcaacattcactatgagaaagaagagntggaaggngagtcccagggncatcaggggctgtctggcttggaaaaaaacagaccangggntcacagccccgactttntttgtggctgtgaaactctgtggggnaaaataccttaacctnnttagnctcgtcttccctggtcttgaaaaggaaaaaagctgaggtgatgaacccnacccgtccagtcagntcatcagagacctgagacagtgctcagagaactgggaagctcgacataaatactaacaaagaccttttccttgaggacgtgaaatactcatttagctccctgaagttttttgttttgtttttttataacctcatggagatgtaaagtatcaacacatattcacaagcaaataaactatcagtc

SEQ ID NO: 1140 - DNA, 146 bp, Homo sapiens
acagttctgtgtgtgcctccaacgaaccatttcgtaaagttgattacaccaaaaacgttaatccgaactggtctgtgaacatcaagggcggaaccacccgcaccctggccgtggcctcttcgaagagtgaggtgaaagaaagcaaa

SEQ ID NO: 1141 - DNA, 345 bp, Homo sapiens
  misc_feature (1)...(345): n = A,T,C or G
gccggaagccctccacgcaccatgcngcagcactctgttcccactgactttggcagnnttgnnnatccnggnccngancanggacntcancanccgntggnacctgcctgactcagactgggacaatgacagcagttctggtccgcctctttgagaggtccaggatcaaggccctggcagatgagcgagaagccgtgcagaagaaaaccttcaccaagtgggtgaactcccacctggcccgggtgacatgccgggtgggagacctgtacagcgacctgcgggacgggcgcaacctcctgaggctcctggaggtgctctcgggagagaccctgccaaaaaaaaaaa

SEQ ID NO: 1142 - DNA, 336 bp, Homo sapiens
ctggattacttcaaaggggccattcctatcaggaagttggtgagctggtataagacctcagtggagtgttccagggatgccatcgtgtttctgactgtccagggcaagctcatctgtgcagaccccaaagacaaacatgtgaagaaggccatcagattggtgaaaaacccaaggccgtgaccttcccgctgaggcatttggagacgccagggctgctgtccatggtttcaacataaagcggcctgtgaccagcagagcccaagagcagccacagagcagaagtccctgttcccttttttatggactcttatgcactacaggcgaacacaaaaaaaa

SEQ ID NO: 1143 - DNA, 543 bp, Homo sapiens
  misc_feature (1)...(543): n = A,T,C or G
actgaggatgatggtgaatgtagaggaaatctcttcatggttattaataacaaaattgccaacttctcacagagctgtaccctttattcaggagatgatttggtagaagcgcttcccaagccttgccctggctgccccagggacatacctgtagacagcccagagctgaaggaggtgcttggtcattccattgcacagctaaatgcanagaatgaccatcctttctattacaagattgacaccgtgaaaaaagcaacatcacaggtggtagcaggaactaaatatgttattgagttcatagccagagaaaccaaatgctccaaggaaagtaacacagagctggcagaagattgtgagatcaagcaccttggacaaagtctcgactgcaatgctaacgtgtacatgagaccttgggagaacaaagtcgtcccgactgtgaaatgccaagcattagatatgactgaaatggcaagaaggcctccaggtttttctcctttccggagtgtcacagtacaagaaacaaaagaaggaagaactaggctc

SEQ ID NO: 1144 - DNA, 445 bp, Homo sapiens
  misc_feature (1)...(445): n = A,T,C or G
actcaccgggggccttcngatctcttgatgccagcagagaggagcttgttgnattccatgacttgcanaaaccntattggatgggaaaagtncagaggancctgggttngtnatctncacctatgaggnnagggggaccatgtacaacacttggaaggcatgtctccctccgnctggacaaagancacttggncaatatntnaggagggcccatgacatacantnnccgcctggaagaaatccggttacactttggnagtgaggacagccaanggtntgagcacctccttaatggacaggccttctccggggaggtatgtgcacctgccaaagtgctaaggcttanggccaacttgtaggattccacgcctacntaacagtgaaataacagatgggaaggctnccttgaacctgananatnaaatccgggcctcctttaaaaaaa

SEQ ID NO: 1145 - DNA, 303 bp, Homo sapiens
  misc_feature (1)...(303): n = A,T,C or G
actgaggctgggatgataaagagcgatgatgaagagtatttcattgaacccttggagagagggaagcagatggatgaagaaaatggaaggattcacgttgtctacaagagatcagcagtggagcggcctcccagagatgtatctgaagacgtctaccacaggggtaggcagcttaagtaaccagagttttacaggacagcttgtaaagtaaaccatgaagtgtacntgatataatccctggtataaaatncctccaacatgcaaaatgaaagaaaaccttgattaaacatccaaaaaaaaaaa

SEQ ID NO: 1146 - DNA, 472 bp, Homo sapiens
  misc_feature (1)...(472): n = A,T,C or G
actgaggtggggtctttcacctttggggcatccgcctgcgctttgagaagcagccatctgaagaagaggagtgggctatgccggccagcccgcccagtcccgaagcgggcaccatccgctgcgcttcattctgtgcgggcttccccatcccagagtcgcctgcggccaccgcctatgcccacgctgagcacgcacagtcctggccatccatcaacntnangagngnantggtngcctcngantgngtaatcggnangctgagcnaanagngtgtccttnttgtgggnccnnacnttnttgctnatnttcacacacantacncacnnncgancntgnagananatgctacctnagccnttnnctccctnctttttcggntggtaggaatgagtccccacccccacctgttctattnaaagtggggtgacngnggaganaccctccctatgagantatgcctaactcgcaaggg

SEQ ID NO: 1147 - DNA, 210 bp, Homo sapiens
  misc_feature (1)...(210): n = A,T,C or G
tgaggaggcctgctgnncctgctgctgtgctgctgatcagtatgnngtcgtttcgggagcanagcagttaccaccgnaaaccanctgagcatacccacaggaggtgcacanntcatcccgcatagaanagttcagccctcgccaggcccagatgttncagaattttgggggagcaggtggtggtagtagtggcactggcagcatcatgta

SEQ ID NO: 1148 - DNA, 370 bp, Homo sapiens
  misc_feature (1)...(370): n = A,T,C or G
ccacgtctccttagctggntgctgagnagccacangcagaacagcctgttgnanccncaccagaggctatgtcgggctnncnaccttnancatggnnnattccttgnncacgntncnnanagcctaccatngtggnccctngctnaggatgnggacattcactacagtcccggatgaaagagactgagaccctgctacaggagtggtctgggcaacctgagcgagattggtctgaaaaagcagatggcacaggggactgaggctgatcctgtgcaggagggagaagagattgcgaagaagcctggaccattcttgaagcaggggaaggagcccgctcacgcccagaggtttttntagactggcttggggc

SEQ ID NO: 1149 - DNA, 109 bp, Homo sapiens
  misc_feature (1)...(109): n = A,T,C or G
tacagtggtgcggtacnttncttcatgaagnctcatcgctgctatgacctngttcccacaagttccaagttggtggnatttgacacttcgctacaggtaaaaaaaaaaa

SEQ ID NO: 1150 - DNA, 518 bp, Homo sapiens
gactgaggtggggtctttagtgcagtggctccagcgccatgttcggctccaatcgcggtggcgtgcgtggcggacaagaccagttcaattgggaggacgtgaagactgacaagcagagggagaactacttgggcaactcgctgatggcgccagtaggccgctggcagaagggccgcgacctcacctggtacgcgaaggaccgcgcgccgtgtaccggcccgagccgtgaggaagagctggcagccgtgcgcgaggcggagcgtgaggcgctgctggccgcacttggttacaagaacgtgaggaaacagcccaccggcctgagcaaggaggacttcgtggagatctgcaaacgggaaggaggagaccccgaggagaagggcgtggaccggctcctgggcttgggcagcgccagtggctccgcgggccgtgtggcgctatcccgagaagacaaagaggctgccaaacttgggctgtcagtgttcacgcaccaccgtgtggacagcgaaggcccaagcact

SEQ ID NO: 1151 - DNA, 283 bp, Homo sapiens
  misc_feature (1)...(283): n = A,T,C or G
cctaggtcattgactttattatctggccaacgacacataagaagatgtttcacangacagaggagttctttcccatgaagacagacacgcngatgnggacgacatggacacatcgnnacacacagtggggctggttctacctggcgnaatgtgggaaggggcacatgnttcagccggataccaacattcaatgttcagttagcagtgaagatatcgaaaaangcttcaaaacaaaccctnggggctccatntcctttactaccttgcaaattcaccatacaag

SEQ ID NO: 1152 - DNA, 250 bp, Homo sapiens
  misc_feature (1)...(250): n = A,T,C or G
ctctaaaggccattagatacattcttcctttcaaggattcgtcgcatccagtggattttntggatgcattcagaacnttttacatggatggactatttactgatattacccttcagtgtccttcaggcataatcttccattgncaccgagctgttttagctgcctgcagcaattattttaaggcaatgttcacagctgacatgaangaanaatttaaaagtaaaatanaactgtcgggcatccaccatga

SEQ ID NO: 1153 - DNA, 431 bp, Homo sapiens
  misc_feature (1)...(431): n = A,T,C or G
cttacatgctagctaaacanatnggggtagaacatgttgtggtgtacgtgaacaaggcagacgctgtccaggactcagagatggtggagttagtcgagctggagatccgggagctgctcaccgagtttggctataaaggagaggaaactccagtcatcgtaggctcggctctctgtgcccttgagcaacgtgaccctgagctaggcgtgaagtcagtgcagaagctcctggatgctgtggacacctacatcccagtgcccacccgggacctggacaagcccttcctgctccctgtagagtcagtctactctattcctggccggggcacagtggtgacaggtacattagagcgtggcattttgaagaaaggagatgagtgtgagttgctgggacataacaagaacatccgcactgtggtgacaggcattgaa

SEQ ID NO: 1154 - DNA, 334 bp, Homo sapiens; identical to SEQ ID NO: 46
  misc_feature (1)...(334): n = A,T,C or G

SEQ ID NO: 1155 - DNA, 111 bp, Homo sapiens
gactgagatggggacttaatgttttggttgatattttgactgaagtaccagaacaggatgatgaattgtataatccagagagtgaacaagataaaaatgagaaaaaaaaaa

SEQ ID NO: 1156 - DNA, 376 bp, Homo sapiens
  misc_feature (1)...(376): n = A,T,C or G
gactgaggactctgaaaaggactcttgttcaggcactggtgaggaggatgaagatgaggacgaggatgattacagatatgatgaagatggggatgattacatgattgatgattttgtagtgcgaaatgaggaaggcgatgacgagaatagcaatcaacaaggagaaaatctgactacatcacaacntgaaattagtaaaacagaattctctttgtaagttaaatatgaagcaaggtttctgccttgttcaaatcattatataatgcatcaaagcttactaatatcatcttctaaaacatttggttaggaattatggtttttatgtttgagtattttaaatttgacaataaaagtttattccagtgaaaaaaaaaaa

SEQ ID NO: 1157 - DNA, 254 bp, Homo sapiens
  misc_feature (1)...(254): n = A,T,C or G
gctgatttgaagatttncctgagacctnagagnctgtttggattctgggcngataatacagnattttcacaganaaggacgaaatcttgantgatgntgcatccagactttggtnttacatacaggagaaactttccagctattgttgggaaatggntgaaactttgccacaccacctccaatnggatnngtggtgacaagttccccagactgnagcganngaccttaataccggaagctcttccgtggaaccg

SEQ ID NO: 1158 - DNA, 502 bp, Homo sapiens
actgaggttccttttagtcttctcctgccttgtgctttctgtgttttccaccatcaaggagtacgagaagagctctgagggggccctctacatcttggaaatcgtgactatcgtggtattcggtgttgagtactttgtgaggatctgggctgcaggctgctgttgccggtatcgaggctggaggggcaggctcaagtttgccaggaagccgttctgtgtgattgatatcatggtgctgattgcctccattgctgtgctggctgctggttcccagggcaatgtctttgccacatctgcgcttcggagcttgcggttcttgcaaatcttgcggatgatccgtatggaccggaggggtggcacctggaagctcttgggatcggtagtctacgctcacagcaaggagctggtgactgcctggtacattggcttcctctgcctcatcctggcctcatttctggtgtacttggcagaaaagggtgagaatgaccactttgacacctac

SEQ ID NO: 1159 - DNA, 556 bp, Homo sapiens
  misc_feature (1)...(556): n = A,T,C or G
ccgattttcggacactccncccaatttgggggaccaancngaccccacagccatcacaaggcatgacttcatntngaccaatggggacaacngcctggtcacgctgctgccactgctaaacatggcctacaagttccggacccagagcccagagaccctggagcagctgtacccttgggaatgcttcgtcttctgtctgaccatctttggcaccttcaccaaccagatccanttttttttcacacacatacttagggctgccatacctgggtcaccgtcctgcaggactggcacgtgatcctaccacggaaacaccatcgcatccaccacgtggcgccccacgaaacatacttctgtatcaccacaggctggctcaactaccccctagaggttataggcttctggcggcgcctggaggatctcatccaaggcctgacgggtgagaagccgagagcggacgacatgaaatgggcacagaagatcaagnagcatgtctggactctnggtcgccaaccttcccaaacctgaactgaagccatctgccaaatcccgggaa

SEQ ID NO: 1160 - DNA, 545 bp, Homo sapiens
gactgaggtttcccagttcgtggcgtttgaggagcttcctgcaggagccccagagctcccccaagatggccccactcgacgcctctccctgcccggccagctgggggcccttacctcccagcccctgcacagacatggctcagatccaggcagttagtgatgctgcccactgtggacatgtggctcaccctgggttcagggcattacctgaccgctctccttggagaccctggtttggaggggagacctgtgcagaagcacctccatccccacccttgggaccagcatctcctcctgcaataccctgggccccactgggaggggcaggacagagctgggcagtggatggggggtctgtggtccccccactgccctgggggcattagctggtctaactgcccggaggcaccggccctgggccttaggcacctcaaggacttttctgctatttactgctcttattgttaaggataataattaaggatcatatgaataattaatgaagatgctgatgactatgaataataaataattatcctgatctc

SEQ ID NO: 1161 - DNA, 545 bp, Homo sapiens
  misc_feature (1)...(545): n = A,T,C or G
tgaggccaagtgaaagagtttggaattgaccctcaaaacatgttcgagttctgggattgggtaggtggccgctattcgctgnggtcagccattggactttccattgctctgcatgtaggttttgaccacttcgagcagctgctgnccggggctcactggatggaccagcacttcctcaagacgcccctggagaagaatgcccccgtcctgctggctctactgggcatntggtacatcaactgctacggctgtgagacccacgccttgctgccctatgaccagtacatgcaccgctttgctgcctatttccagcagggtgacatggagtccaacggaaagtacatcaccaagtccggggcccgtgtggaccaccagacaggccccatcgtgtggggggaaccagggaccaatggtcaacatgcattctaccagctcatccaccaaggcaccaagatgataccctgtgactttctcatccctgtccagacccagcaccccatacggaaaggtcngcatcacaagatcctcctggctaacttcttgga

SEQ ID NO: 1162 - DNA, 542 bp, Homo sapiens
  misc_feature (1)...(542): n = A,T,C or G
atatagaaattccatgcctgcatccagttttcaacagcaaaaactccgtgtttgcgaggtttgttcagcttaccttggtctccatgacaatgaccgtcggcttgcagaccacttcgggggcaagttacacctggggttcattcagatccgggagaagcttgatcagttgaggaaaactgtggctgaaaaacaggaaaaaagaaatcaggatcgattgaggagaagagaggagagagagcgagaagagcgcctgggcaggaggtctggatcaagaacccgagatcgcagaaggtcacgctcccgggatcgtcgacggaggcggtctaggtctacctccagagagcggcggaagttttcccgttccagatcccgagatagatacaggcgccatcgcagccgttcccggagccacagccggggtcaccgccgggcttccagggaccggagtacaaaatacaagtaactactntgactcctnatnaacttcaaccaggagtgagccctttgtctttgngttcccangatntgctaagatctgtcat

SEQ ID NO: 1163 - DNA, 541 bp, Homo sapiens
  misc_feature (1)...(541): n = A,T,C or G
gaactgaggtgggagatgcacattccctcagtggcaggtatttgaaggggaaccgggaaagaaggtgaacttggcagagctgttcaagggcaagaaaggtgttttgtttggagtccctggggcatttacacctggntgttctaanacccacctgcctgggtttgtggagcaagctgnagctctgaaggccaagggagcccaggtggtggcctgtctgagcgttaatgacgtctttgtgattgaagagtggggtcgagcccaccaggcagaaggcaaggttcggctcctggctgaccccactggagcctttgggaaggcgacagacttattattggatgattctttggtgtctctctttgggaatcgtcggctgaaaaggttctccatggtgatagacaacggcatagtgaaggcactgaacgtggagccagatggcacaggcctcacctgcagcctggcccccaacatcctctctcaactctgaggccctggccagatgtcctctgactctcccatctctcccacccggctctaggccaaa

SEQ ID NO: 1164 - DNA, 541 bp, Homo sapiens
gactgaggattccatttaagatcgggcagcccaagaagcagattgtttccaaaacagtggagagagactttgaaagggagtatggaaaactgcagcagcctggaagagcaaactaaacgcctgcagaaggacatgaagaaaagcaccgatgccgacctggccatgtccaaatctgctgtgaagatatcccaggacctactgtccaacccactgtgtgagcaggaccaggactttctgcacatggtgacagccctagacacagccatgaaacggatggatgccttcaaccaggagaaggtgaaccagatccaaaagacagtgattgaacctctgaaaaagttcagcagcatattcccaagcctcaacatggcggtgaagcggcgggagcaggccttgcaggactacgggaggctgcaggccaaggtggagaagtacgaggaaaaggagaagactggccccgtgctggccaagctccaccaggcccgagaagagctacgtcctgtgcgggaagactttgaggccaagaataaacaactcctgg

SEQ ID NO: 1165 - DNA, 541 bp, Homo sapiens
  misc_feature (1)...(541): n = A,T,C or G
aactgaggaaactcccatgctcaccaagnnagcaaaaacagaagcgcagggtaggaggaggaggagcgacagctccttcttgccgtgcagaagaaggagcaagagcagatgttaaaggaggagagaaagcgggaaatggaggaaaaggtcaaggcagtggaagatcgagcctaagaggagaaagctcagggaagaacgagcatggctattggctcaaggcaaggagctacccccagaactttcccatttggacctgaattctcctatgagggaagggaagaagaccaaggacctctttgaattggatgacgatttcacagccatgtataaagttctagatgtggtgaaggctcacaaggattcctggcccttcttggaacctgtggatgaatcgtatgcccccaactattaccagattattaagatccccatggatatttcaagcatggagaagaaattaaacggaggtttatattgtaacaaggaggaatttgtncatgacatgaagaccatgttcanaaancgccgaaaatacaatggt

SEQ ID NO: 1166 - DNA, 539 bp, Homo sapiens
  misc_feature (1)...(539): n = A,T,C or G
tgaggtggggtctttcagtgacagcctttgatagtggtgaatactactgccaggcccagaatggatatgggacagccatgaggtcagaggctgcacacatggatgctgtggagctgaatgtggggggcatcgtggcagctgtcctggtaacactgattctccttggactcttgatttttggcgtctggtttgcctatagccgtggatactttgaaagaacaaagaaagggactgcaccgggtaagaaggtcatttacagccagcccagtactcgaagtgagggggaattcaaacagacctcgtcgttcctggtgtgacctgctgcggctcctccgttgtccatttgccttactcaggtgctacaggttccagcccctgctggctgtagctgcacaggatgccttcaatgtcttctaggtcccacaggaccccttgcttttattctagctaggatataaatttaaaaacatcatctanttccccctcctctntcccaccctccctcctttncttaccaccattgggtggctccgagactc

SEQ ID NO: 1167 - DNA, 538 bp, Homo sapiens
  misc_feature (1)...(538): n = A,T,C or G
actgaggtattaaagtnctactccaactggccaaccatcccgcaagtgtacctcaacggcgagtttgtggggggctgtgacatccttctgcagatgcatcagaatggggacctagtggaagaactgaaaaagctgggtatccgctctgccctggtagatgagaaggaccaagactccaagtgagggccccgggccctcgccgagcagagcgccctctccatcctcggggccagaaaagccttactgcgtggtggtgccctgttgctgtgatgcttgcgctgggcctcctggcagcaagcgggcaggtgcttttactttagtctctggctcagaattccctctggtgaacgtacaaccactgcactgtaaatcaatgtcgcgatcctgtattgctataaccgtgatctgttcttacgttgtctttattctctgccggccggctttgggagtcacttctgattcttgtttgggttgtagagatggtaaagccccctgatgtttttgtaacttcctgtaaaagggaaatgatggacagagg

SEQ ID NO: 1168 - DNA, 538 bp, Homo sapiens
  misc_feature (1)...(538): n = A,T,C or G
aactgagttctgggccaagacttgtattcaatcgagtaaacggccggcgacccctnaccacctccccatccctcgaggggacccaagagacctacacagtggcccacgaggagaacagtccgatttgtgtccgaagcctggcagcaggtagagctgacaacctggatggtggccctgccgatgagagtggcccacggcctgtgcagtatgtggagagcactcctgatccccggctacagaactttgtacctattgacctcgatgagtggtgggcacagcagtttctggctaaaatcaccaactgttcctagcagctgtccgggaaggaatgttgccatagtggaccctttgccagaagaggaccatggtgcgccgatccaccttgtggcctggctgggtaccggccacacctgaagtgccaacatttggacttttgcacctgttgttcccttggcttggctgtcccaagctgccagagccaggggccaaacctgtctaacctcagtcctgctcactgtgcccagggaccagcccctgt

SEQ ID NO: 1169 - DNA, 537 bp, Homo sapiens; identical to SEQ ID NO: 47

SEQ ID NO: 1170 - DNA, 535 bp, Homo sapiens
tgagatccagacgcggaagtgtgtcttcataccctgcggctcatccagtctgtggttctagaaccagacgtcttctccaaggtggcctctgagctccagagctccttacccttgcagcgcatcctggccatgtccaagagccgcaactcccacctgcagtctgctgcccaggagctcctggaagacctccgcgccctggactgtaatgtttagatgtgctctaccaccaggagcccggtgaaaatgccagtggtccatcccctcccaggcttctaactccatgttcaaaactagatgtcactgtatgtcatgtgttagagattgcaggccttgagggactagagatggacatgatgggtcagcatcctacctcttcctcctgggagtgcacacttgttaggcagctggttaatcttgccagagcagtgaccaaaaaaatgtcacctttgaatgcatggaaactctcaaagtgttttctcagagtagcttcttgctgccccggaggctgccttgcagcatgggagtttagatcact

SEQ ID NO: 1171 - DNA, 534 bp, Homo sapiens
  misc_feature (1)...(534): n = A,T,C or G
tgtactggtgtctccggtgccgcaccagatgctgccctacatgaacgtgggcacgctgtcgngcactgagctgcagctgctcaaccagcttgcactgtcggcggaagcggctggcaccggcaccatcttcaccgatgagcagcntcgaagccctggagaacctcttccaggagacgaagtacccagacgtgggcactcgggagcagctggccaggaaggtgcaccttcgggaggagaaggtggaggtctggtttaagaaccgccgagccaagtggagacgacagaagcgatcctcctcggaggagtcagaaaacgccgagaagtggaacaagacgtcctcaaaagcctcgccggagaagagggaagaggaaggtaaaagcgatttggactcggacagctgacggccgcggccgcgggccggccggggcgcttgcctgacgcaaggacttgcacagacagtcgatgctacttgcacacaccctgccttgcgggagggggtcgagaaagcaacgaggagctagctgtaaataatgc

SEQ ID NO: 1172 - DNA, 531 bp, Homo sapiens
  misc_feature (1)...(531): n = A,T,C or G
actgagggtcccggtccctcgaatctgggtgggcatagacttgaaggtccagctgcagaagcccctggtactgaacgaggcagacaacacagactggcacctactgcaaggtgacagtgatgtcagagtagagagaaaacgtccggaagaagtggagctgtggggacttaaggaggggacctacctgttccaactgacaagaactgactcagaccaaccagaggaaacagccaacctgactatcactgtgctaactgccaagcagacagaagattattgcctcgcatcctacaaggtgggccgctgccggggctccttcccacgctggtactacgaccccaaggaacagatctgcaaaagttttacttttggaggttgcctgggcaacaagaacaactaccttcgtgaggaagagtgcatgctagcctgcaaggatgngcaaggaatctcaccgaaaaggcaccatccagtgtgctccggcagctgccatgccacccagttccgctgnagcaatggctgctgtatcgatgg

SEQ ID NO: 1173 - DNA, 528 bp, Homo sapiens
actgagagaaggagcaggctgtaaatcgagctggtattgtccaggaagatgtgcaaccgccagggttgaaagtgtggtctgatccatttggcaggaaatgaggctgtcagcaagtctgatgaggaaagtggacgtctttatcctgtgcactccgcagtggggacaatagatgcctcactgtggcagcatggcatggagagggaactctcatgctgctagccagaccccttgtgatagagactgtgtgcaaagacagtgcttcccttaactccctggagaacctgaacagatgccaccattaggaagtgccttgcggctccattgactttgcaggagcagagccagcctgcaaggctgtttgtggaagatctgctgctcctgcagtctttatcacttccaagctgtgatgtgaacacaagcaacctgtgggctcaaggtccgtggctgctctgacaccttctgaataagcgatttcagtgcaaatggccttgccaagctgcctcgcagggctcttggaggatgtttcag

SEQ ID NO: 1174 - DNA, 526 bp, Homo sapiens
  misc_feature (1)...(526): n = A,T,C or G
tgagacttggattcagccgccgtggnctcagnatgtatgatctgcccaaaaaagaagacgccttactttaccagagcaaggactataatgatgactactatgaggagagttatttgaccaccaagacatacggggagcctgagtctgtgggcatgtccaagagcttccgccagccggggacctcacttgtagatgcntgataccttccatcaccaggtgcgtgatgacattttctcttctttagaagaggaaggcaaggatagggagcgcctcatctatggccaagacagtgcctaccagagcatcgcacactaccgccccatttccaatgtctccaggagctctctgggcttatcatattatcctacatcctccacctcttctgtgtcctcctcttcatcttctccctcttcatggcttacccgacgtgccattcggccagagaagcaggcccctgctgctgctctgggccaggatcgacaggtcccactctggggccagctgttactcttcctggtctttgctg

SEQ ID NO: 1175 - DNA, 525 bp, Homo sapiens
  misc_feature (1)...(525): n = A,T,C or G
actgagacagacggagagctggncttctccccttcctgaccatcatgcatatgcaaatcaagcaagaggacccaaagaaagaaatccttctggccatgctgatggcagacaaggagaagaaaggttacatcatggccgtctgagctgcggtcgaaactcatgaaactgggagagaagcgtcacatcacaaggaagtggatgatcttttcaaggaagcaggcattgaaccaaacggccaagtgaaatatgacactgtttatccagaggatcaccattcctgtgcgagactactaagggagccaagatcaagagagcagatganagccttcggggcctgaaaacctagactgattcctttttgtaagggaagtctagagatgacacaaccactgcatggcataagtaccaataaatgatgtagccatggcattggataactgtaataaggtctgtcttgatttcggtactaacattantctagccatttgcagcatagtctagccctatgatttgtagtcagggttg

SEQ ID NO: 1176 - DNA, 524 bp, Homo sapiens
  misc_feature (1)...(524): n = A,T,C or G
gaggtgtgacaagcagcctgcctataccccaaccactacagaccaccagccgcaccccaactacccagcccagaagtaccattcccggagcagcaaggcaggtttgtggagcagcagctgaggagaagcgagctgtcatcccgctctgagcacagtggagggaccagcacgaanaacctcatgcccaaagagtcccgggagtctcaggcatagatgccttctgggactaggggtgcattgtgagcctgaacacctccctataggcgggagaaacagcccaaaccacaggaagcaacanaaactggagaaccgccacctttagaattcccaacactcaggctctgcccgtcgtcggcttggctgcaggacagagacttgactccatcccagctctggtcttggctgggatggcactaccctgtgagccaaacactttaggtgtaagtaggtacacttgtgacgtcactgacctagcgtacctttccttttcatatctacactgaccttaacttataaaaaaaaaa

SEQ ID NO: 1177 - DNA, 523 bp, Homo sapiens
  misc_feature (1)...(523): n = A,T,C or G
gactgagactggacaggaacacganctgatananagcatgcctctcttggaatggttngctaacaactataanaaattnggagctacactanaaattgtnacagataagtcacaagaaggatcacagtttgtgaaaggatttggtggaattggaggtatcttgcggtaccgagtagatttccagggaatggagtaccaaggaggagatgatgaattttttgaccttgatgactactaggtagtcgacatgggtccggcaaccgtgcctcaccctccagcattcaacccaaggagcatacccgtggtggagtccaacagatccctgccttacaattggagcatttccagaacttaatccgtgagcattggatactgaaaagaaaagtgaaacaaaaccagacccaaccctacactttggtttgtcgtggtgtcagcgcagcagccgacaactaagtctctaaaggccactgtggactcatttaaaaagaatcccagtttttacttttacttgatggtaaaattg

SEQ ID NO: 1178 - DNA, 521 bp, Homo sapiens
  misc_feature (1)...(521): n = A,T,C or G
gactgaggctcctgtgcatgaccgatgagtggttctcggagtacgtctacgaggtggtggtggacaagaagcatgtcccagaagaggtgctggctgtgttagagcaggagcccattgtcctgccggcatgggaccccatgggggctttggctgagtgattgcgtggactgcctcctgctctcctcctcccatgggatcggatggagctgccaaggacagacccggggactgaaaccaaagttacatggatggctgttcccacaggatacagtcagactcttgggtttccagtctcctccaggaacctctttgagaaaaatgctttatgctgaaacaaaatattcataaaggaaaaaataaaggggaaggatcggggcatnctgttgctctcctcatctctgacggctcaggatctcgtagcattttaattggatgtcattgtcctctgtcacagtctttgtgtttgtagtaagacggagtaagatgagcagctgaggtgtacggagaacaaacagtcctgg

SEQ ID NO: 1179 - DNA, 520 bp, Homo sapiens
  misc_feature (1)...(520): n = A,T,C or G
gactgaggttaccagcttggcaagccggtccgagccctgcataccgctgggatgaacgtcagcacactgcacctctggcagccagccggnngngncnnggcntnnntgtgngcncngannttaannggggnaggcannaggatcatgaatgnatgctncccncagctgcatcaacaatgtnaaaccagcctggnctatnnganacnttntntnaanactggaatttgctgacacaagcaacgcacgtggcgaggagaggcaactcggactacagtgatctgagtgacggctggctggagatcatacgtgccgaagcccctgatactggtgccgacctgcccttgagcagcgtgaatggcgtgtgcccagaagttccagcccggctctccatccgcattctcactgctgaagctggctctgtggaaggggtggctcagcgggagatcctggctgtggagacaaggttttccacagtgacctggcagtaccagtgtgggctcacttgtgaggacaaggccgt

SEQ ID NO: 1180 - DNA, 518 bp, Homo sapiens
gactgaggtactgaaattgccaaccgtgggggctccaaggcccaggggccacagcaccagccaggctccgagggtcccagctatgccaaaaaaattgcgctctggatcgccggtttgctcggagctggtgggactgtcagcatcgtctatatttttggaaacaaccctgtggatgaaaatggtaccaagattcctgatgaattcgacagcgatccaattctggttcagcagttgcgccggacatacaaatacttcaaagattacagacagatgatcatcgagcccaccagtccctgccttctcccagaccctctgcgggagccctactaccagccaccttatacactggtcctggagcttaccggggtccttctgcacccagagtggtcgctggccactggctggaggtttaagaagcgtccaggcatcgagaccttgttccagcagcttgcccctctgtatgaaatagtcatcttcacatcagagactggcatgactgcatttccactcattgatag

SEQ ID NO: 1181 - DNA, 513 bp, Homo sapiens
  misc_feature (1)...(513): n = A,T,C or G
gagactgccttcccagcttttgccagctttaaagacatgatgcctcagaccacgtgagcanaaagagtttgaangcggggacttccaggatttcaccaggcaggacatgcccactggtggaccggagccaagaaacctcatgtccaagcccgggtttncagtgtggcttcncacngagacccccaaggagggtgcagacngactttggagaatttcaaagngaaaagcccaaaatcagcaagtttgacttcttagtagctaattcccagagcaaaatgaaatccagtgaagaaatgatcaaaagtgagctggcaacctttgacctttctgttcaaggatcacacaagaggagcttgagccttggggataaagaaataagccggtcctctccttccccggccctggagcagcccttcagagaccggtccaacactctgagtgagagggctgcgctgcccgtcatccgagacaagtacaaggatctcactggccgaggtggaggaaaatgagaga

SEQ ID NO: 1182 - DNA, 511 bp, Homo sapiens
  misc_feature (1)...(511): n = A,T,C or G
aatctgtcagaacaatttgaacagtactgggatgaagaggaggaagaatggcacttaaaaaatgctattagagtagacggaaagatttaccatccatcatgttatgaagattatcaaaatacatcttcatttgattgcacaccatctcccagcaagacaccagttgaaaaccctttgaacattatgttgaacattgtcaaaaacgaattgcaagaaccctgtgaaagtcccaaagttaaggaagaacaaattgatgccccaccagcttgatcagaagaaagtgtagcaacacccactgaaattaaaacagaaagtgatacagttgagtcagtttaaataaaatgagaaaagtatgcttttctttttaaacaaaagctgctgttggatctaggtgaagaatttttttatgtnaatatagaaatatctatattaattgnctagctgtggcagggccttcagctatcatttggntaataaatacatttttannatttgcatttcctactggctg

SEQ ID NO: 1183 - DNA, 511 bp, Homo sapiens
  misc_feature (1)...(511): n = A,T,C or G
tgcgccacaaggtggcagcatgaaagcaaggcgcataatgggagaagcttccagaggaccgggactcttgcctttgagcgggtctacactgccaaccagaactgcgtagatgccgtaccccactttccttgnggtactctggactgcaggactacgtttgcagccaagtncctgccgccttcgccggacgtgatgtacctgtttgngaggcaaaaatactttgtcggctatctgggagagagaactcagagcacccctggctacatcttcggcaagcggatcatcctgttcctgttcctcatgtccttcgccggganactcaaccattacctcatcttcttcttcggaagcgactttgagaactacatcanaacggnaagcacgacgatctccccgctgcttctcatcccctgattgctggagacagagaaggacgctcaccagatcaatagagacgcatcataacgcaacgccgcgaaggcttntgctcctcttcaagctgtagatgctg

SEQ ID NO: 1184 - DNA, 510 bp, Homo sapiens
ggcaggttacctgtttggcagtgacgtggtcgcccagttcaatgcagccaacgacattgatatgatctgccgtgcccaccaattagtgatggaaggctacaagtggcacttcaatgagaccgtgcttactgtgtggtcagcgcctaattactgctaccgctgtggcaatgtggcagccatcttagaactggatgagcacctccagaaagatttcatcatcttcgaggctgcaccccaagagacacgtggcatcccctccaaaaagccagtggccgactatttcctgtgactccttggccccagcccctctggcccttggaccactgtgactgccctctgcccagtcggaggctgggtctgaggggctgcctggctttgcttgccccagggtgcggacttgctctggagaggtggagccttggctcctggcttcctctcctttctcccacttgatccatgaagttttcagtcattttttttttctttttccctttttttccctttcttttt

SEQ ID NO: 1185 - DNA, 503 bp, Homo sapiens
  misc_feature (1)...(503): n = A,T,C or G
tgaggagggttcagagatgggctagatgccggcaaagcacttactcttcaacggggcttcaatcaagggtacaaagagggtgcagacgtcattataaactatggactccttagaggaacactgagggntttntataacctgtaantgatcgantcatttagccacaattctanngaaggtctttaatagaggtactatgcacaaattcaccagtttanaagagtntttcgncaggctggtgaaatggcgtcacnggncangagcacccgactgctctnncgaangccnganggncaaatgccacnttccnccnanggtccnacanccctctctaacnggnnctgactccctnttatgnagcgtgtgaatnccgntncagatgngcttncntanaatanatanatntttttttaaannaaaagagcatgcacatttggaaaanccggcctctcttggnttcnggagcagacatncagtttagntganacagctgggagtaccgg

SEQ ID NO: 1186 - DNA, 501 bp, Homo sapiens
  misc_feature (1)...(501): n = A,T,C or G
ctcccttgcacttcacttntgccttcggggccggcttctgcaccaccgtcatcgcctcccctgttgatgtggtcaagacgagatacatgaactctgccttgggccagtaccacagcgcaggtcactgtgcccttaccatgctccggaaggagggaccccgcgccttctacaaggggttcatgccttcctttctccgcttgggatcctggaacgtagtgatgtttgtcacctatgagcagctcaaaagagccctaatggctgcctaccaatctcgggaggcacctttctgagcctctccatgctgacctggaccctgcttcccagccctgccctgtctttttcttcatcctctgcccagtcccattctcttcccatttcctgcaccccgatttacttcccacctcacctncctgtgcctctgtactgatgactcacagtgaggaggcctgacaccagaccctgagccctcagccctttttacagntaagcccacatcttcat

SEQ ID NO: 1187 - DNA, 499 bp, Homo sapiens
aagcaaatccaagatctgcgccaatgtgttttgtggagctggcagggaatgtgccgtcacagagaagggggagcccacgtgcctctgcattgagcaatgcaaacctcacaagaggcctgtgtgtggcagtaatggcaagacctacctcaaccactgtgaacttcatagagatgcctgcctcactggatccaagatccaggttgattatgatgggcactgcaaagaaaagaagtctgcgagtccatctgccagcccagttgtctgctatcaagctaaccgcgatgagctccgacggcgcctcatccagtggctggaagctgagatcattccagatggctggttctctaaaggcagtaactacagtgagatcctagacaagtactttaagagctttgataatggcgactctcacctggactccagtgaattcctgaaattcgtggagcagaatgaaacagccatcaacatcaccacttatgcagatcaggagaacaacaaa

SEQ ID NO: 1188 - DNA, 498 bp, Homo sapiens
  misc_feature (1)...(498): n = A,T,C or G
gactgaggatgtacttcttattaatgtggtgattgaacagatgatttgtgatactgaccctgagctcggaggtgctgttcagttaatgggacttcttcgtactctaattgatccagagaacatgttggctacaactaataaaactgaaaagagtgagttcttaaatntcttctacaaccattgtatgcatgttctcactgctccacttttgaccantacgtcagaagacaaatgcgagaaagataatatgcttggatctaacacaaccaacacaatttgccctgatnattatcaaacagcacagctgcttgccttaattttagagttactcacattttgtgtggaacatcacacataccacataaaaaactacatcatgaacaaggacttgctaagaagagtcttggtgttgatgaattcaaagcacacttttctggccttgtgtgctctncgntttatgaggcgaataattggcctgaaagatgaattttataatcg

SEQ ID NO: 1189 - DNA, 498 bp, Homo sapiens
  misc_feature (1)...(498): n = A,T,C or G
cacgagctgtctgaactggtgtactctgcctcgaacctgctggtgctgctcaatgacgggatcctgaggaaggagcttcgaaaaaagttgcctgtgtcgctgtcccagcagaagttgcgtgacatggctgagtgtacttggagtgtgtggaggtgttcatggagatgggggcatgccaaggtgtggggcgaagtaggccgttggctcgtcattgctctcatccagttggccaaggccgtcctgcgcatgctcctgttgatctggttcaaggctggcattcagacatcaccccccattgttccactggacagggaaactcaggcacagcccttggatggtgaccacaatccgggcagccaggagccatcatatgtggngaaacggtcacacagagtggtgcgaaccctccagaacagcccatccctgcactcacggtactggggagcccctcagcagcggnaaattcggcagaaacagcancaggaggaactgagcata

SEQ ID NO: 1190 - DNA, 491 bp, Homo sapiens
tgagaccttttacttgtcctagttgacttgtgtgaaaatggcgggaagcgtcctactgcaagtagcagtgctagtttcaccaaagaacaagcagacactattcgcagaatccgaaatagtaaggacagctgggagatgctaggagtcagacctggagcctcaagggaggaagttaataaggcctaccggaagctggctgtgctgcttcacccggacaagtgtgtagcaccaggcagtgaagatgccttcaaagcagttgtgaatgcccggacagccctcctgaaaaacatcaagtagaggcagaggaaactacaagcgagctcaagtgcaaacagactccccttgaggtgaaataaccaacatggagttttccttcacgaatgctcactgttgtgttccctcatgtgtaagttaatagtatgggtgcctgttaccatgttgtggccatttctcagtgagatgaccgcttttgtgtgagagataaccccaaa

SEQ ID NO: 1191 - DNA, 489 bp, Homo sapiens
  misc_feature (1)...(489): n = A,T,C or G
tgaggtgacgaaaactggtcttgtggtggtgaaaacatgaagatcattggtcttcactgctccagtgaagacttacatactgggcaaattgctctcattaagcatgggtccaggctgaaaaactgtgatctttatttttcaagaaaaccatgttctgcttgtttgaaaatgatagtgaatgcntggagttaaccgaatttcttacntggccttctgacccagaaataagtttgctcactgaagcttctagttctgaagatgcaaagctagatgccaaagccgcagaaagattgaagtcaaacagccgggcccatgtgtgtgtcttactccagccgttggtgtgttacatggtgcagtttgtggaggaaacctcttacaaatgtgactttattcagaaaactgcaaaagcgttgccgggtgctgacactgatttttattctgaatgtaaacaagaaagaataaaagagtatgaaatgttaaaaaaaaaaa

SEQ ID NO: 1192 - DNA, 481 bp, Homo sapiens
gactgaggtttctgtaaagcaagcttccttcctttgctggaatttgcctatacttctgtactaagttttgacttttgtagcatggctgatgtagccgtcttagctcgccacctttttatgtcagaagttttagaaatttgtgaaagtgtacataaactaatggaagaaaaacagcttacagtgtataagaaaggagaagttcaaactggttgcatctactcaggacttagcagcacacaatggaactacaacaccacctggcactaggaatgaagcaaccacaactttgtccggtgaacttgggcattgtgaaattgtactgctggtaaatggagaattgccagaggcagagcagaatggggagccagagcagcagcctgcacctcaggcttctccagaggctgaagctagtgtgtcccctgtagaaggtatacctgagccccaccctgaaatgggaactgcaagcttagcaaaaaaaaaa

SEQ ID NO: 1193 - DNA, 481 bp, Homo sapiens
  misc_feature (1)...(481): n = A,T,C or G
gaggttcttccagatgcttccagccctcagcagantgccatcagcagtccacacccggctggtttgcacctccctntgctggactttgagctgcgcgccaaaagaaagatgcacctgatggaggtgcatttctttaaccgacatacagttgaaggaaagactggtctcctgatggatgtctgcaatgattaagagggaatgcttctggtaccctttccctcggatgcccgtgaagggctcgggcatcaccagccactgtcccagcccgggctctaagtctgacccaagccgaagtgcctgcgccccgctatgcgctccatcaccactagagggagtaaagagcgggcgtcttccctgtgctctgtcctccatagccttgcctaggaaagaaagatccctccaagtcaaagtgagaggaggtctaactgggaagatgatcaatggtgcggcgggtagggaacaagtgaggtaatgggagggc

SEQ ID NO: 1194 - DNA, 481 bp, Homo sapiens
  misc_feature (1)...(481): n = A,T,C or G
gactgagagctggcattcctaccatcctttatagtgatgctacaggcacaaagaggantggataaaaacattggtgagcaactcaatagagcatatgaagccttccgacaggcatgcatggatagagattcagcagtangagagctacagcaaaagactgagaactatgaacaaagaatactgccgagcaacaggaacagctgtcatttnaacaaaacctaattgacaggctgaaatcacagctacttctcgtggattctagtcgagataacagttatggctatgtaccttngcttgaagacagngacngaaggaagaataatttgacccttgntgaaccacatgataaagtgaaactagnaacactganagataagcantcaaaggtgagacgacaagaagtttcttctggaaaagaatccgccaagggnctcaacatccctctgcatcacgaaagggataatatagagaagactttctg

SEQ ID NO: 1195 - DNA, 480 bp, Homo sapiens
  misc_feature (1)...(480): n = A,T,C or G
ggaaagataccagctcctgcgtggggcgacagaagcaggtgtctcacccacgggctgtgatggagctcccgaggactcgctggcccagctgcttcgtgtgctgcaagaccttcgagaagcccacggctccagcctggccagcccagcagccagagagccccatcaccttctagagctacagacgtgaggtgtccgtgaggtgtccatcgagcccctgttaggtgtttgcagatcctagacatgctcaggatccttgtcccagtcaactgttctggggagggctgtgacccagcatagtcttctccatgtctgcgagggacaaccgtgacacctgcttccttgggagaaccaactgctcttgtagtccccatgacccatattcttcacccaggagaacaggctgtccacctcacattgctttgccactgtctggcctcctaggtcggatgccacagtggtttgntgtcataaataaatgct

SEQ ID NO: 1196 - DNA, 476 bp, Homo sapiens
  misc_feature (1)...(476): n = A,T,C or G
atatgcggctctgctgcaggcggctcagccatggnngggtcaggggntgaaaaagaggccgnggactggagcccagcccctccgangtatgaggaataccggccacccgcgctggatgccatccgcctgcctcgctatgccctgtatctgctgatggccgctatcctggcggtggccgtggcctatgccattgntggccacctcatcaaagatctagctcatgacctggatgactgggcctttggccctaagcctgaccaggaggaggaaggntcccggaagctgcnggccagcttggcatgcagaggacctggaagaactanatnttaagctgnccctggcctggcgtgnngaggatgaccctgcccgtgctcctcgncgcacctncattgccttcaaggacncgccggcgcaanccaactnttgggaggctgnactgacctggaggagtgnnatgngtgacactggcgggcctg

SEQ ID NO: 1197 - DNA, 474 bp, Homo sapiens
  misc_feature (1)...(474): n = A,T,C or G
gcaggtagctggaagcaggaagactctccaggtggccgggaggatggcttcactgctgagcacctggctgcagaggccatggcagccgatatggacccctggctggtatttgatgcccgtaccacacctgccacagagctggatgcctggttggccaagtacccaccatctcaagttactcgctatggggacccaggttcacccaactctgaacctgtgggctggattgcagcctatgggcagggttacacccccaactcaggggatgtacaagggctgcaggcggcctgggaggctctgcagaccagtgggcgacccatcacaccaggtaccctgcgccagctggccatcacccaccatgtgctctccggcaagtggctgattcacctgtcacctggcttcaagctggaccacgcctgggctggcattgcccggcctgtagttgagggccgnntccaggtggccaagaaggga

SEQ ID NO: 1198 - DNA, 470 bp, Homo sapiens
actgagcagcgttcatcttcccgaattggacatgctacaaagggttttaactggtatggtaccgaacgacttatccggaaacatttggctacacgaggcatcccaacttacatatactactttcccagaagtaaggcccgccattcacagcctgcatcctcctcctcagcaccactggttccctagcaaccagcccagcattgggtccagttttcagcaaccagttagattcttgctcccagattgactgttagttttcaggaaacaaggctatctttggtcatattctctgctctggaatttctgggctagtctttcctgaattctaattttgttgctctggaagtgttaactgtgatccagtacctgtaatacaggaacacacaatgtatatggggaagccctttggcttcagattgcctatgtttgaataataataataatagatggcctattgttaaaaaaaaaaa

SEQ ID NO: 1199 - DNA, 469 bp, Homo sapiens
  misc_feature (1)...(469): n = A,T,C or G
ctcaggatgagcgtgtttcccgttcttatcttgccctggcaactgaaaccgnggacatgttccatctcctcaccaagcaagtccagaagccnttcctgaggccagagcttggtccccgattagcagccatgctgaactttaacctgcagcagctctgcggacccaagtgccgggacctgaaagttgaaaacccagagaagtatggggtttgagccaaagaagctgttggaccnactgacaggatatttatttacaattggactgtgctcgctttgctaaagccatcgccnatgaccagcgatcctacagccaaggaacttgtttngaagaantcatttcaaagatgcagganngcgggaatcaaatncaccatcgcaaaagagaagttaaaacttcttgcntagaaangtggagggaaatcnnnggtaaatnaatgcnctggccaaatatanactacagcgaatgcccc

SEQ ID NO: 1200 - DNA, 466 bp, Homo sapiens
gagcactgagctcttgtcgaagatttgagttctccatcttcagtgcctcaacttgctttaacaactgatcatatgaagctgcagccatccttggctacccttggacctataaggttaaaaaggattttgaaattcaccactaagaatggagtagcctgcttgttttgttttgaagaaagagacaaaggcagcaaagctctccagacaggaggagtggtgcttattcgcaggcttgggctccaaacgccatggtcccagcagcaacagttcctaagaggatggaacatggggtctgagctgaagagaaacagggttcaagcaaaaggcagagcctcagtcccatcggaagagatctgcagtgctacaggtaagctctctatctggtgagactgtttcaaggttaaagatgacctaactcctcctgtatgtcaaacttacagaatacaaccactgataaagaaaaaaa

SEQ ID NO: 1201 - DNA, 451 bp, Homo sapiens
  misc_feature (1)...(451): n = A,T,C or G
tttgtgaacacagctctggaatacaaagaaacgtaccgctccaaaaactccatctggtttcacgaagtatttatcgttcacatcatcctgccctcaagcttcaaagaccccaactaaggacaccatttcagcagttctcttctctaactcacctttcattacataaattgaaactttctccaattaaatatggcntaccagccccgcaggaacttttggccagcaaggttagctgcaagactcttaaaacttcgatatatcatactgggatctgctgttggaggtggctatacagccaaaaaaaccttcgatgaatggaaagatatgataccagaccttagtgactataagtggattgtgcctgactttatatgggaaattgatgagtatattgatttgggtttgnatcaatcaacattaanaatagctctgggtttcgagggatggcagt

SEQ ID NO: 1202 - DNA, 450 bp, Homo sapiens
tgaggtggagagctctacttccggtttcactcctagtggagctggtgcctcagtatccatgattgccagtagaaaaccaacagatggcgcttcctcatcaaattgtgtgactgatatttcccatcttgtcagaaagaagaggaaaccagaggaagagagtccccggaaggatgatgcaaagaaagctaaacaagagccagaggtgaatggaggcagtggggatgctgtctccagtggaaaggaagtttcagaaaacatggaggccgaggctgagaatcaggctgagagccaaacagcagaggggaccgtggagtctgcagctacaattaaaagcactgcatgttaagaggcgagcagaaccttcctcctgagggaaagtggttttgtacataatgtattttttcacttttggggattctttttgtataactccaataaagattgtaggca

SEQ ID NO: 1203 - DNA, 445 bp, Homo sapiens
  misc_feature (1)...(445): n = A,T,C or G
cctaaacccctccgtttctgtcaaccgtaacagtagtccagctgtcccagctcctaccccagaaggagtccaggctgtgaacaccacaaagaaggcctcaggcaccactgcccagagctcctcctctgagagtgaggacggggacgaggacttgattcctgccacacaaccctccacctatgctctcagaaccagtgtgacgacgcctgcagtaccaggaggaagcgaggtgggacacacaccccctctgagtgctacgtgacatgtgtatagnatatctatttttttaagcgacttgcctctctcccttcaaatccaccgtgcccagaggcctgnggacctccctccatgttatctgcanagccagcaaggtcccgggtgtggntcatcccacaccctgngacccctggcgcagcctgaagccttgccccatcaatttttccag

SEQ ID NO: 1204 - DNA, 444 bp, Homo sapiens
  misc_feature (1)...(444): n = A,T,C or G
ctgtcttcctctgcttcaactcgganaagacgagagtaagaggaatctggagctgccacgcctctcagaaacctccataaaggaccgcatggccaagtaccaggctgcagtgtccaagcagagcagcctcagccagctacacacangagcnngannnnagcgngagnaganntnatagcaagggagcanaagtgagattgntnctgcaggtccgggagnagctgcgcccgtccattcagggattgaattaagganntngggnctgacaatagggtagaggcctttttgnattcgtagagantaangctnttntggagaggaagaacgtgtattaccnttangggactggttntgcntgaaaatntttattcnttnangcntnnaatnttcagtattccangtcttnccaaccccctancgncaagaatcaagagcacatatatg

SEQ ID NO: 1205 - DNA, 443 bp, Homo sapiens
  misc_feature (1)...(443): n = A,T,C or G
cagcactcgtcgtcgtgaagngaaatgatccgtnacagagagcaggaggagctgaggcgacagcangagggcggctttaaaccaaactatatggaaaatagagatcagganatgagaatgggtgatntgggnccccttggagcaataaacatgggagatgcatttagcccagnacctgctggtacccaaggncctnctccaatgatgggtatgaatatgaacaacagaggaactatacctggcccaccaatgggtcctgggcctgccatgggaccanaaggagctgcnaatatgggaactccaatgataccagataatggcgcagtgcacaatgataggtttccccaaggacctcnatcccagatgggttcacccatgggaaatanaacaggttctgaaactccccaggcaccgatgancggtgtagggcctgtaagtggtgg

SEQ ID NO: 1206 - DNA, 441 bp, Homo sapiens
  misc_feature (1)...(441): n = A,T,C or G
ggcttctactggaatccccaccattagttttttgcggggtccanaaanccaaacgcttaccctcaagagcatttgtatgttatggtgaatgccaagcttggagaagaatcaaaagaacctctctctgatgaagatgaggaagacaatgatgatgttgaacccatttctgaatttcgatttgtgcccagtgataagtcagcattggaggcgatgttcacagcaatgtgtgagtgccaggccttgcatccagaccctgaggatgaagactcggacgactatgatggagaggagtatgatgtggaggcacacggtcagtgactcgggccttgcggctttcctgttncattntangcatgtagttgtnctannggcntangatgantgtcncccatgtaagatggcagtanataaagggaatgatccgatagcgaaaaaaaaaaa

SEQ ID NO: 1207 - DNA, 429 bp, Homo sapiens
  misc_feature (1)...(429): n = A,T,C or G
aactgagatgcagaaacagtggtatgtataaaaatatagcatgctttcttgatctcacacaccttaaacaccgcgagactttaaatcttgctggatggaactgccactcaccgctagaaatcggggatcaacagcaaactctggatgaccctgtaaccacatctccagctccgcccggcgaggggcctcatcacccaccagcaaagtaccatccaccttattgatgacagggatccgggtctccaggtccagatcaaggngattaggctcttccatgcactccacctccagctgcaacccagaatccacccccatgagcacatacacttgtttggaaggaggaggagagggaagcagggccaatggtagtcatgaggaaacttcccaactgccttcaattactgataataaaaagaccttatctagtca

SEQ ID NO: 1208 - DNA, 428 bp, Homo sapiens; identical to SEQ ID NO: 48
  misc_feature (1)...(428): n = A,T,C or G

SEQ ID NO: 1209 - DNA, 422 bp, Homo sapiens
  misc_feature (1)...(422): n = A,T,C or G
gttctccagccctcagtggaaccagcacagacaaccgccccaggnatgatncagnatgcgnaccaggcaggcttgcttcnacagcaggaagaactagacaggaaagctgccgagctggaacgcaaggagcgagagttgcagaacactgcagcgaatttgcatgtgcgagacaacaactggccgccactcccctcatggtgccctgtgaaaccctgcttctatcaggacttctccacggagatccctgctgactaccagcggatttgcaagatgctttactatctctggatgttgcattcagtgactctgtttctaaacctgcttgcgtgcctggcctggttcacaagtgacgcagccaatggaacagcctttggcctctccatcctttggtttctgatcttcactccctgtgccttcctttg

SEQ ID NO: 1210 - DNA, 422 bp, Homo sapiens
  misc_feature (1)...(422): n = A,T,C or G
ggcccatgcagtttctgggcatggttatctctcatgacatgctgctgggacgctggcgcctgtctttagaactgttcggcagagtattcatggaagatgttggtgcagagcctggatcgattttaactgaattgggtggttttgaggtaaaagaatcaaagttccgtagagagatggaaaaactgagaaaccagcaatcaagagatttatcactagaggtcgatcgcgatcgggatcttctcattcagcagactatgagacagcttaacaaccattttggccaaagatgacagcagaacaacataatttacactgtgatttatcttttttgctgagggggaaaaatgtaaaatgttnctgaaaattcactgctgcctttggggaaagtgcttcagcaaaggctcntgtatagagggaatagg

SEQ ID NO: 1211 - DNA, 421 bp, Homo sapiens
  misc_feature (1)...(421): n = A,T,C or G
tacaggaacaaccttatactaccagcctggcctcctgtatggcgggcctgtggagcacgactgcngtgtcctccgtggnattggctattacctggaagctntgctttgcctggctccnnttatgaaacacccattaaaaatcgttctgcgaggagtgaccaatgaccaggggngacccttcggttgatgntcttaaagcgacagcnctncctctactgaaacagnnntgggatcnatggagaatcattngagcntaaanatcttgcnntcggggaatgncccctgnaggagggggcgaancgcnttttttcctgncccgtgaggaacgtccngaagtctgtcagntcacnnacccangaaaaancancgggatcanaggaatggctgtatattagttngcgncntcacctcacatggtaaa

SEQ ID NO: 1212 - DNA, 417 bp, Homo sapiens
acagtgtagacgggcgcccccggtgttgtctcagtcacgcgtcacaagtcgcctgcagctgcccgaagagccaagagtcagtattccggccagcttcacgaagtcagagagatgatgaaccaggtggaaggccagcagaagaacctcgtgcatgccattgagtccctgccaggctcgggccccctcactgccttggaccaggacctgcttctcctgaaggctacctctgccgccaccctcagctgtcttggggagtgcctcagcctgcttcagcagagtgtgcgccaggcagcgccacccagccacaagccaggcgcctcagagaccatcctgggatggcatgggcccacgtcacattccacagaccaactgaaaaatgggaccctcggctctctaccctccgccagtgccaacata

SEQ ID NO: 1213 - DNA, 414 bp, Homo sapiens
  misc_feature (1)...(414): n = A,T,C or G
gatgttcatcagctcagtgcgatgtttgaactgaccccangngtatgcttccagtcatggagaaactctggccttgcanagcangaagaagctctatgctgaaagcnnctgcngacaccaaaggacgacaggaactgncaaaggaagaaaaggctcgngaactcttcctgcaggcagnggaggaagaacaaaatggagctctctatgaagccatcaagttctaccgtagggcgatgcagctggtgccagacattgagttcaagatcacttacacccggtctccagacggcgacggcgttgggagcggctacatcgaagagaacgaggacgccagcaagatggccgatctcctgtcgtacttccagcagcagctcacgttgcaggagtctgtgctcaaactctgtcagcctgagt

SEQ ID NO: 1214 - DNA, 403 bp, Homo sapiens
  misc_feature (1)...(403): n = A,T,C or G
gttcttctgacctttggagttcatcgaatgggatgagccagcctggttttggtggaattctggggacctccacatcccacatgtctcagtccagtagttatggcagccttcattcacangnncgcttgagttatcctccacactcagttgtcaccaacagacataaacacaagtcttccgcctatgtccagcttccaccgtggtagtaccagcagntcaccatatgttgccgcctcacatactcctcccatcaatggatcagatagcatcctaggaaccagagggaatgctgctggaagctcacagacgggtgatgcacttgggaaggccttggcatctatttattcccctgaccacacaagcagnagttantncatctaaccccatcaacaccagagggata

SEQ ID NO: 1215 - DNA, 390 bp, Homo sapiens
tcaggaatccgagcagcatacaggccggcgccggtgatgtacatcacagccatgaggaagaaccagcccatctggcccaccgtggtggccttgacaaagccctcagcgatagtaaagtgcatggtgggtacaacaccactcaagccaagtcccaggaacactcctgaacagagcagacactgaccgtcaacaggaagcagctacaggaaagcactgctgtggatctggaactgatgtacttacgaaaagcaactgctttctcatgaactatacatgtttaaaagtatttaggacctcttttgacctccctgggtacctgaacatatatgacagacacagattcacacatatacagataaaataaatgaaacagggagctaaaaaaaaaaa

SEQ ID NO: 1216 - DNA, 390 bp, Homo sapiens
ccttcttaaagatcgaagtctgaagcccatgaagatcgccgagagtgacattgatgtcaagctgagcatcttctgtgagcaagacaggatactccaggacttggaagacaagatccgagctctcaaggagaataaagatcagctagaatcctgtgctggaggtgctgcacaggcagacagaacagtaccgagaccagccacagcacctggagaagatcacttgccagcagaggctcctgcaggaggacctcgtccacatccgtgcggagctctgcagagagtccacggagatggaaaatgcatggaacgagtacctgaagctggagaaggatgtggagcagctaaagcagaccctgcaggagcaacacaggagagccttttttttccagg

SEQ ID NO: 1217 - DNA, 389 bp, Homo sapiens
  misc_feature (1)...(389): n = A,T,C or G
aaggtgttcttggtgaggaaggntacaggatcagacgctggtcagctctacgccatgaaggtcctgaanaaagccaccttgaaagtgctgagaccggntcagatttannatggagagagacatcctggcagaggngaatcaccctntcattgncangcctnnattatgcctttcagacccgagggcnngctctactctgancctggacntncctgcggggaggngacctcttcaccaggcctttccaannaggcagatgntcaccggaggaggatgttaagatcctaccctggccgagctggccttngcttctagnncacccnccatggnaatgggnataatntacaggnatcngnagccagagaatntcctcccggacgaagagggac

SEQ ID NO: 1218 - DNA, 382 bp, Homo sapiens
  misc_feature (1)...(382): n = A,T,C or G
agatgtacagcagtggtacaagggcttcattaaggactgccccagcgggcagctggatgccggtggcttccagaagatctacaagcagttcttcccatttggagaccccaccaagttcgccacgtttgttttcaacgtcttcgacgagaacaaggatggcaggattgagttctccgagttcatccaggcactgtcggtgacctcaagggggaccctggatgaaaagctgcgatgggccttcaagctttatgacttggataacgatggctacatcaccaggaacgagatgctcgacatagtggacgccatttaccagatggtggggaacaccgtggagctcccagaagaagagancacaccagagaagagggtggaccggatc

SEQ ID NO: 1219 - DNA, 368 bp, Homo sapiens
  misc_feature (1)...(368): n = A,T,C or G
gagtgctggctctcgtcctcgcagccaccaccccgaaaacacactcgntcctgggctgtgctgaaggcntngctgnngctcctgctgctgngtgtagcaggagggctggtngtatgccggntgacagggctgctccagcagcccctctgcaccagcgngaacaccatctacnacantgcggnncagggcctgcntcatcatgagatnctccagagggtcctgcaaaccgantcgcagnagtgagctcaccctgagcacccgntgactcccagcnttggntctntggattcctatggaatnngggtnctgcnnnacanaacctatttttagcgttaagactctaantgccntcatcacatgtaatgctg

SEQ ID NO: 1220 - DNA, 363 bp, Homo sapiens
  misc_feature (1)...(363): n = A,T,C or G
ggacccttcctgcgcatctccttcaattcctatgagctgggctccctgcaagttgaggacgaagcaagccagcctttctgtgctgtgaagatgaaggaggcactcagcacagagcgagggaagacactggtacagaagaagcccaccatgtatcctgagtggaagacaacgttcgacgcccacatctatgaaggccgtgttatccagattgtgctgatgcggncagntgaagaccccgtgtctgaggncacggngggcgngtcagnnctggctgngcgctgcnngaagaacancggcnnggctgagttctggctggatctgcagcctcaggccaaggcgcctgntgtgtgcgcagcctttcct

SEQ ID NO: 1221 - DNA, 362 bp, Homo sapiens
gactgagataatttttatggtgggacgaggatacctatctccagatctcagtaaggtacggagtaactgtccaaaagccatgaagagattaatggcagagtgcctcaaaaagaaaagagacgagagaccactctttccccaaattctcgcctccattgagctgctggcccgctcattgccaaaaattcaccgcagtgcatcagaaccttccttgaatcgggctggtttccaaacagaagattttagtctgtatgcttgtgcttctccgaaaacacccatccaagcagggggatatggtgggtttccagtccactgaaacaccctgagtgagacattaaagtaaggtagcaacaaaaacaaaa

SEQ ID NO: 1222 - DNA, 360 bp, Homo sapiens
  misc_feature (1)...(360): n = A,T,C or G
agcccagagctcctctgtggagccctgaggaagaggcccagcttcaggaactatacctcgcccacaaggatgtggaaggtcaagatgtagtggaaaccatattggcgcacctgaaagtcgttcctcgaacacgcaagcaggtcatccaccacctggtccggatgggcctggccgacagcgtcaaggagttccagaagaggaaagggaccnanattgttttgtggacggnggaccaggagctggagttacagcgtttctttnaggagttccggnactctgatgatgttcttggtcaaatcatgaagaatatcacagccaaacgttcacgggctcgagtagtggacaaactgttggccctgg

SEQ ID NO: 1223 - DNA, 355 bp, Homo sapiens
  misc_feature (1)...(355): n = A,T,C or G
gagagtatatgatactgcactaacacttgcctgtgctggtggccatgaggaactggtacaaacactactagagagaggagctagtattgaacatcgagacaagaaaggttttactccactcatcttggctgctacagctggtcatgttggtgttgtagagatattgctggacaatggtgcagacattgaagcccagtcagaaagaaccaaggacacaccactgtccttggcttgttctgggggcaggcaggaggtggtggagttgttgttagctcgcggtgcnaataaagaacacaggaatgtttctgattatacacctctaagcctggctgattctggtggctatgcgaacatc

SEQ ID NO: 1224 - DNA, 355 bp, Homo sapiens
  misc_feature (1)...(355): n = A,T,C or G
cgcacgatgggtacggtactgcctatgcatgagcagagctatgactcctatgacaacagctacagcaccccagcacaaagtgcagctgattactacgattatgggcatggactcagcagaggacgcttatgactcctatgggcaagaggaatggactaactcaagacataaggctccttcggcgaggacggcgaagggcgtctacagagaccagccatatggcagatactgattgnactgtctgatgttgtgaaatagccaatntccaccgtcctgtatactgttcaaagtaatttttttctatgaccaancnctttttaaataaatcaaaatgcttaaaacactgaaaaaaaaa

SEQ ID NO: 1225 - DNA, 350 bp, Homo sapiens
  misc_feature (1)...(350): n = A,T,C or G
caggaggaacgtggaggagctcatgtngnacattaagaagacagcgaacaaagttcnctccaagctanagagcattgagcagagcatcgagcaggaggaaggtntgaaccgctcatcagccgntctgaggatccggaagacgcagcactccacgctgtcccgaaagtttgtggaggtcatgtncgagtacaacgccactcagtcagactaccganaacgctgcaaagggcacatccagaggcagntggagatcaccggccggaccacagaccagtgaggantnggaaganatgctggagagtgggaaccctgccatntttgcctctgngatttatttaggtctggcgaga

SEQ ID NO: 1226 - DNA, 347 bp, Homo sapiens
  misc_feature (1)...(347): n = A,T,C or G
agtttgggcaacgaaacatgaagccttgtanagaatgcacatgatctactggccaaattggcatgggatttttctcctgaacaacttgatcatctttttgattgctttaaggcnantatgtaacgcagcattgatattaccatgtnatatgcanatnganntgattcattagaacttacagagnangnattanccnacaaatacgttacataactcgtangacacttctctgatatgaaaggacatttatctagttngaaagactttgccagtgttttctttctacaaactngactttcattntcatgatagngctaatagccctaataaagactcttgttcaaaca

SEQ ID NO: 1227 - DNA, 344 bp, Homo sapiens
  misc_feature (1)...(344): n = A,T,C or G
acgggccctgggtgtctgcctggccaagcagtcacaagcagatgacccggacaaactagcatgtggccttaagaaaagaagtcagaagaggaaccccagcccatcagttgtgccttcttggacagaccagcctgtagcagatagccatggaaagtcacgggccacagggggcagcagcctcagaaatgaagcatggtcagagcaaggccagcctcctgcatcatggtggcttcaaagtgcttcagtctctgaagggatcagtggggaggagttcagccccagcagcctccctcggcaaggntgtggctctgtcccctgntccttcagatgagcaactagcccgg

SEQ ID NO: 1228 - DNA, 342 bp, Homo sapiens
  misc_feature (1)...(342): n = A,T,C or G
gactgagatgagatgaagcanatggctgccntgtggngcaacagcttgtngagnccagagaactgnttgaacagatggnttnggaagtncnagaaantccaccccaaagtcgaggaatgtatagcaacaggatgagaagctacaagcaagaaatggggaaactggaaacggattttantgnnattagnancgnctacagggaccnaagnacggaatgagctcctaggggatgctggncattcctcctgagaaccagagggcacatcatgctggataacacggagaggctggaaaggncgtctcggagactagaggctgggtaccagatagcagtggagaccg

SEQ ID NO: 1229 - DNA, 328 bp, Homo sapiens
  misc_feature (1)...(328): n = A,T,C or G
gctgggcctgatgctgnnnttcatctgaagacctaggaagtgagaagctgnccantcttgtctgcccctctcaacagntattcttccctgggggcagggcaggccgtctgctgggacaattggggaaaagaacctctccctggaacttctttttcatgtttacaggagagcagagagtatgtgcaggaaggagcccatggggaggggttgctcctgtgtgtaggtgcgtgcccatgtgtttgnggggaccggaggacatttgggtgcttctctgccttagtgccttggctggtgagcttagctctagatgttctttaaaaagaaaaaa

SEQ ID NO: 1230 - DNA, 328 bp, Homo sapiens
tgagacctgttggaggacctgtcggagagccgcgagtgcgtgaactgcggctccatccagacgccactgtggagacgagacggcaccggtcattacctgtgcaatgcatgcggtctctacagcaagatgaatggcctcagcaggcccctcatcaagccacagaagcgcgtgccttcatcacggcggcttggactgtcctgtgccaactgtcacaccacaaccactaccttatggcgtagaaatgctgagggtgagcctgtgtgcaatgcttgcgggctctatatgaaactccatggggtgcctcgaccacttgctatgaaaaaaaaaa

SEQ ID NO: 1231 - DNA, 327 bp, Homo sapiens
gactgaggcacacactgataaagaagctctgccagctgagggagagcgagccggagctggcccagctgctcgtggatcagatctatgagaatgccatgatagcagcaggactcgttgatgacccccgggccatggtcggccgcctgaacgaccttttggtcaaggtcctggagaaacactgacagccaagacactggatttagtgtcaacccaggtcttctcgggtgataatggacctgcctggggaggcaggacttaatacacaaacagtgccaccaactgcttgagctcagctttatttacttcaattaaacagtatttcttagt

SEQ ID NO: 1232 - DNA, 315 bp, Homo sapiens
actgaggctcttggtctggaagcggtggatctgtcagcattcagctctgcagccgagttggagtcgctgggtttggagaggctcaagtgtgaactgatggtccttggactgaagtgtggggggaccctgcaggagcgcgcagccaggctcttctctgtcagaggcctcacaaaggaactcattgacccagctttatttgccaagccttccaaggggaagaagaagtgaatttccttggcacacttcctccgctgtgacagacttgtggcctgtgttccttttgatactaaaagccaattttttaataaaaaaaaa

SEQ ID NO: 1233 - DNA, 305 bp, Homo sapiens
gactgagaccggatgcagagtttgaatccagatcccaaagcccggtatacaagcatctatggcgccctcaagaggatcatgcacactgaaggcttctggaggcccctgcggggcctgaaccgtgatgatgatgggtgcagggcccgcgcacgccatgtattttgcctgctatgaaaacatgaaaaggactttaaatgacgttttcagccaccaaggaaacagccatctagctaatggtattttgaaagcgttttgtctggagctgggaagctcttctctctggggctttccttcccccggaccca

SEQ ID NO: 1234 - DNA, 305 bp, Homo sapiens
  misc_feature (1)...(305): n = A,T,C or G
acagcgaacagccatccatcaagccatnaaatntctctttcccaggactagagacaaagacagaggatagagaggggcggnaatacatttgtagcctaccatgcagntggcaaaaaggctttggcaaatncaagaaaacattcttggccaaaatcccggggaagttactgncactttgttctctacaaggaaaacaaagacaccatggatgccatcaaggntctatccaagnacctgcggntnaagnnaaacatattatnctatatgggaaccaatgccaaaagggcaaacacaggccaggagat

SEQ ID NO: 1235 - DNA, 304 bp, Homo sapiens
  misc_feature (1)...(304): n = A,T,C or G
tgagcttcagtgtttctgcccctctgtncaaaggatanttttacctgtgagacagatggtctttgctttgtctcagtcactgagaccacagacaaagttatacacaatagtatgtgtatagctgaaattgacctaattcctcgagacaggccatttgtatgtgcaccatcttcaaaaacaggggcagttactacaacatattgctgcaatcaggaccactgcaataaaatagaactcccaactacaggtaagttgttgcattagcacccttccctttcttcttctaagatgctaaaaaaaaaaa

SEQ ID NO: 1236 - DNA, 303 bp, Homo sapiens
  misc_feature (1)...(303): n = A,T,C or G
tgcccagagctattccatccggcagcagcagcagtggatctgagatgccaggcgccaacccaggggacccctctgcccctagcccaggatctccctgagggctggacttgcaacaggaagcaggcagaagggggtggaagcacagagcaacttgttgctttcgggacccaaagactcttccggggatccagcatgttgccttccatcctctttctgcctgtgccccaatgggaagcaccccctatcccacctctgtcccaactgtacccctgnttaactttttgnaaatgataaaaaaaataa

SEQ ID NO: 1237 - DNA, 300 bp, Homo sapiens
  misc_feature (1)...(300): n = A,T,C or G
ggcaaccccagtaccgaggaacgaatccagcagggacatgaggattngnctcctcatccactttcaggcgcatctgatggcngnnaccaacctcagcctttctagccaccgtggagccagtntatatgcaacaaattggaaatgctaagatatnactaagctcgnctggagtnttgttgaatggaagccttaatacctgcnngtactacacctgtcttccttaatggnaaatnctctnatncanggncacnactggantnatccttaccggactgaatgngggaaatacacagacagatg

SEQ ID NO: 1238 - DNA, 299 bp, Homo sapiens
attgagtggcttgaagaaaagcaacagcaatttgagaatcttgaccagcaacttcggaaacttcatgccagtgttgaagccttggtctgtcatagaaaaggtttgttagccgtgttaaaatgcgtattctgaagtgactgtagaaaggaagaacaacagtctcagaggatgccctgctgcctgggctgcacgggggcagctgaagcagacctgccaggagtctgacgctaggctgtctcaaaacagaaaaagaggatttgttcaatatcatttaaatttttccactgtaaaaaaaaaaa

SEQ ID NO: 1239 - DNA, 298 bp, Homo sapiens
  misc_feature (1)...(298): n = A,T,C or G
attgaggatccctgctganccagtttctcagtctacccttctgntnatcagtgggatgttagccgcaatcaaccttatatcgatgatgaanggtctgggtncnatggnccgtcttctgctgaccctagngtcagactgcgaatgcnccagcagaggagtgggggnacctgnctacatgaanatctagcttcacgttctgaagtcccaggaaccaatttctaatgatcaaaaggtttcagatgatgataaagaaaaaggggagggagctcttccaactggaaaatctaaaaagaaaaaa

SEQ ID NO: 1240 - DNA, 296 bp, Homo sapiens
  misc_feature (1)...(296): n = A,T,C or G
caaagagttcctttgntncgtgtatctttacagaacacaacaggaattgaaaatgcatcagaacactgagtctgtggcagtcactgagactctggctgaggtacctgaacacgtgcttcgaggacttccagaggaagtaagacttttaccatctgcggtcgacaagactcggattggtgtnnnacccanatannncantntnagaaggnagatgccttngatcatnngatggnnanaatgaactaagagatcccagnttaggaatncttgtatacatgancagaggtgatttaccc

SEQ ID NO: 1241 - DNA, 291 bp, Homo sapiens; identical to SEQ ID NO: 49
  misc_feature (1)...(291): n = A,T,C or G

SEQ ID NO: 1242 - DNA, 290 bp, Homo sapiens
  misc_feature (1)...(290): n = A,T,C or G
taaagccagggcatggtgccagccctttcatttcaagtacgactgaaggagaaaattttgagcagacgccattgagacgaacattcaagtctaaggtccttgcccgataccctgagaatgtagactgnaatccctttgatcaggatgcagtaggaangctgtgcatgcccaaagggcntggcattcaagacccaggctgatcccagggagccacagttccatgcctttattatcacaagggagganggtnctcggacatttgngctntgctcttaccttttatgaagaag

SEQ ID NO: 1243 - DNA, 290 bp, Homo sapiens
  misc_feature (1)...(290): n = A,T,C or G
gaatttgatgtctctggactaactgacactgatattagaccgaanttcaatttaaaaccaaacacaaaaggaattactctacagtcaataacaggcagtcagcgtttagatgtagaagagttccagaatgatgaagaagacttgagtccacctgtgatggaatataatatcgatgtgaaatcaaacactgagatacagttagcagagataaataaagatgtagcctcgatacctagtgaatcttcaacagaatctgttaaagatcttcaggaggtcaaaagtaagacaca

SEQ ID NO: 1244 - DNA, 289 bp, Homo sapiens
  misc_feature (1)...(289): n = A,T,C or G
catacggcggctttctatgtaaagtttgcagagggtcagagcantgcctncacgaccatcttcgggtgaactgtggggcatccacttgatgcccccacgaatcctagtggaatgtttactccccaatggaatgatagtgacntttagaatgcctccgtgaggccacactcgtcaccatcaaacatgaactgttcagagaggccaggaaataccctctccatcagnttctgcaagangaaactttttacanaacaaaaatccccaaaatacatacaaatgatggagacat

SEQ ID NO: 1245 - DNA, 289 bp, Homo sapiens
  misc_feature (1)...(289): n = A,T,C or G
gagcagtttgtattctactaccacatggaccccttcaggcccatgagcggacggttcaaagaccgggtggtctgggacggaaaccccgagcgatatgacgtctccatcttgctctggaagctgcagtttgacgacaatgggacatacacctgccaggtgaagaatccacctgatgttgatggtctggttgggacgatccggctcagcgttgtgcacactgtgcccttntctganatctactncctggccgaggccatttggctctgcgcncgcactgatgattatcgta

SEQ ID NO: 1246 - DNA, 286 bp, Homo sapiens
actgagggagagacttcgaaggaaggcctgacttcacatcctgagccttctctgagccgagcctagagggaactcccatgctcctctgcagcagcaagaagccctacccctgcttccctgccaaggtcctgggcagctcttaccttgacttgttcatttgaggttacgtgcacagaaaacaatctctgtgaatccctgggatggaaacatccggaaacagataccaccaatgacacggccatctttaattaaagcaagggttttgtgtttcctaaaaataaataaa

SEQ ID NO: 1247 - DNA, 272 bp, Homo sapiens
  misc_feature (1)...(272): n = A,T,C or G
ggaacaccaagcatcaaatagtggtaccttatcccagagcaatgcagttggttcggccttcacacaagacacaagatctgtaaaaccacagctagcccaaggtngatcangccctnanttaggccctttgagagaaagtcnaaccatggaccaagcggtacagaccgcctnggnccanttacctgcnccagcacctgttgggagaangagccntgtaccagnnagncctttgcnacctaccantcnnanagcaatagacaaccaagagcaca

SEQ ID NO: 1248 - DNA, 270 bp, Homo sapiens
  misc_feature (1)...(270): n = A,T,C or G
caaagaagttcagtatantcccacctatgagaccatgttcgctcctgagttnggaccagaaaatccctttcnaacacagcaaatgggtgcccctanaaatatgctttctgggtatgcagagccagcacacatcaatgacttcnatggntttgaacagcaaagaaggacatttgctacatacgggtatgcactggacccttcgttagataatcatcaggtgtctgctaagtatattggctctgtggaagaagcggagaagaaccaaggcct

SEQ ID NO: 1249 - DNA, 268 bp, Homo sapiens
tggaagtttgaaagacagtttgatcaagaccacaatctggacctggcagagaaagacttcactgtgaacactgtggcaggggccatgaagagttttttctcagagctaccagaccccctggtaccatacagcatgcagattgacttggtggaagctcacaaaatcaacgacagggaacagaagcctgcatgcgtctgaaggaagtgctgaagaagttcccgaaggaaaaccatgaagtcttcaaatatgtcatctcccacctgaacaa

SEQ ID NO: 1250 - DNA, 267 bp, Homo sapiens
  misc_feature (1)...(267): n = A,T,C or G
acgcccaagagaatgnttctgttacccgctatgaaattcccaacatatcctgttccccactactcattcttttagtaaatgacagaagctcattcctattgaacaacaatgcagtacaatgcagaatgttagagaaaaagcctttttatcctgctttctttgaacacatacttactttgatcaaaattatttgtaaagaacatctttcctactttttgattttaacaaatgcaaattcagttctctaaaacttgaaaacaaacaaaa

SEQ ID NO: 1251 - DNA, 260 bp, Homo sapiens
  misc_feature (1)...(260): n = A,T,C or G
aactgagtaccttcacgaaaatgggatcatacatcgggacttaaagccggagaatgttcttttatcatctcaggaagaggattgtctaatcaagatcactgactttgggcagtccaagatcttgggggagacctccttgatgagaaccttatgtggtacgcccacttacctggctcctgaggttcttgtctccaacgggacntgctgggtacagccgtgctgtggactgctggagtttaggagttattcttttcatctgc

SEQ ID NO: 1252 - DNA, 259 bp, Homo sapiens
gactgagggcacattccagcagatgtggatctccaaacaggaatacgaggagggagggaagcagtgcgtggagcggaagtgcccctgaagttgccccctcccccaaatacccgcccaccccatccacagagaaacgccagaggggctgttctaccagccagaaatccaaaagcgctgaactctccctttcccattatcctcttctctcttacccacatcttcttagactgttatgttcctgagttgaaagaagaaaaaa

SEQ ID NO: 1253 - DNA, 250 bp, Homo sapiens
gactgagagtcgtcatttttgaacttccacgagtctgactgcgaactgagaggctcggcgccctgtgactcgctcctctctctcaacactgaaaagattttgagccaggccaagtctattgcagagcagaagagattcccatttgctaccgacaatgacagcaccaatgaagaattagccgattgcttatgtcctggtgggcagcggtctctacgatgaagccataagacacttttccacgatgctccag

SEQ ID NO: 1254 - DNA, 245 bp, Homo sapiens
  misc_feature (1)...(245): n = A,T,C or G
cttccagggcatcaggcgatggcccagtatctgtccagagcantgacacagagatgcaagatggaggccgngcagcacgtgatgtcagaagacacccagatgtcacacaggatctggccaaagttccagactnntacacacacgggtcgctccttcancggagtncacatncacagagcncggtcatgctttggcttcacaactgtgaaggccgtatacatcangacggagcacagaaaaaaaaa

SEQ ID NO: 1255 - DNA, 244 bp, Homo sapiens
  misc_feature (1)...(244): n = A,T,C or G
ctggaagagaagactgagaaaagcttgggcngagcttggactcctctgctgagggcaaaggggccttgaaganggagagagaggtgcaccagaaactgctggctgacagccacagcctggtgatggacctgccgctggcagatccatcaccgagagaagaactggaaccgggagaaggtggagcntgcttggagcngtcntgnacagcaancggnangantgngggcgacatgaaggaggagct

SEQ ID NO: 1256 - DNA, 242 bp, Homo sapiens
  misc_feature (1)...(242): n = A,T,C or G
atgaaagaggtgatcaaggagcagngtggagaggtgatgatatttgnactggcncaccatgtgcagtcgtttctcagcgagcataacaagcccccaccaaagtctttccatgaagaaatgctggaaaggcaggctcaggagaagcagcagaggttgctggaggccaggcggaaggaggagcaggagcaacgtgaaatcctccacgagattcagagaaggaaagaggagatcaaggaagagaa

SEQ ID NO: 1257 - DNA, 236 bp, Homo sapiens
  misc_feature (1)...(236): n = A,T,C or G
ccagtcagaagctcttcgnnagagtattgaagttctgccaaggtgtactgattttgaagatatcactctgcaacgtgcanagaatgtggttttgnccgaagattccaaatctnaggctaatcagaaagncngnaacgtgctgngtatgagaataactattcacanggnttctgaagtgcgttttctnttcatttgaggactacacagggnactanacaggtttccgtatccaggca

SEQ ID NO: 1258 - DNA, 234 bp, Homo sapiens
attattccattgatgtgtttattgccttttatatcacaacaagactctttttgtactaccatactctggctaacaccagagcgtatcatcagagtaggagagcgaggatttggttccctatgttttctttctttgaatgcaatgttaatggcacagtacctaatgaatattgttggccattttctaaaccagcaataatgaaaagactaattggatgaagactctctctctgta

SEQ ID NO: 1259 - DNA, 232 bp, Homo sapiens
  misc_feature (1)...(232): n = A,T,C or G
actgaggttgcttgtcaagtgtcccacagatgaaaaaaatctccacgtcttacgaagaaagaaggaagcaggccacggctattgttctcctgggagtgataggggcagagtttggagctgaaattgaaccgccgaagctgctgaccaggcctcgaagctccagtcaaaatnccttgnaaggcttttggctttgaccagcgggaggcttccaacttacttccttggccaaaac

SEQ ID NO: 1260 - DNA, 217 bp, Homo sapiens
tgagaacaggccccatctcctcgatctacagactacacttggaaacacaaacaaatataaatatctgaagacccacgtgggacctgaagaatggcctattacatggatacatgggcggcagctcccgccgaaagaccagccaacaattctcttgaagaacattatagatggcaaattcccattaaacacaatgtcttcgaaattttaaaaaaaaaaa

SEQ ID NO: 1261 - DNA, 199 bp, Homo sapiens
  misc_feature (1)...(199): n = A,T,C or G
gactgaggagctggtgaccttcgaggntgtggctgtgcacttcaccatggaggagtgggctctgctggatctatcccaaaaggagctctacaaagacgtgatgaaggagatattgagaaatgtggtttccataggagacataaggaaacaccaaaagattgacaataaataccaaaattctgggagaaaactaaaaaaa

SEQ ID NO: 1262 - DNA, 194 bp, Homo sapiens
  misc_feature (1)...(194): n = A,T,C or G
aattgcctactttttgttcancgattggcagaagagtccaggacaaatgcttgtgaaagtaaatctcgtatttaccacgtactggctgcagcanaggtaattctgaagaagagcaaaggttaggtgtcaacatgtgcttaagcataatatgatgtgttaatttaagtngtaacatnataaaacacttttgtatg

SEQ ID NO: 1263 - DNA, 193 bp, Homo sapiens
actgaggggaaacaggaatgtcactctgacgctctcctggaacgttgtaccaaacgctggaattctgcctcttgtgacaggatcgggacatgtgtctgtgccatttccagatacatacgaaataaccaagagttactaaattattctgaatatgaagcatatttttatacatgttgaattgcaaaaaaaaaaa

SEQ ID NO: 1264 - DNA, 191 bp, Homo sapiens
  misc_feature (1)...(191): n = A,T,C or G
gagcaggtggccctgagccggacccaggtgtgtgggatcctgagggaagagttgtaccagggtgatgccttccaccaagctgatacacacatatttatcatcatgggtgcatcgggggncctgccntngannncgatgtatnctaccatntggatggnctgttncgggagtggccttctacctgaagaaaa

SEQ ID NO: 1265 - DNA, 187 bp, Homo sapiens
agccgctatcgtctttatcaaggagccatcctcccaggatgcacttcaagggcattgtcccctggtgaggggagcaggggagagaaaatggtagccatttttacattgttttgtatagtatttattgattcaggaaacaaacacaaaattctgaataaaattacttggaaactgccaaaaaaaaaaa

SEQ ID NO: 1266 - DNA, 186 bp, Homo sapiens
aaagattgacccagaaaacacctctccgagtccttcaccgaaggcctttggctgtgagaactcgggccattcactctatgaagacacactacctggatgagcatcattttcgtctgcatttgaagacccaagctggaacagttttaaaccataaagtagccatcaatttaatgtcaaaaaaaaaaa

SEQ ID NO: 1267 - DNA, 184 bp, Homo sapiens
  misc_feature (1)...(184): n = A,T,C or G
gaggtaaacattgcancgnaattttctgaaaaatgcngatgagctagtcaaacagaaaattcatccaacattttnttattagtggctatcnccttgcctgcaaggaagcggcatgcccaagagaatagttaatgcaaaaattgcttgtcttgacttcagcctgcagaaaacaaaaatgaaaaaa

SEQ ID NO: 1268 - DNA, 183 bp, Homo sapiens
tgagagcagagtagaagagatgatttagaagccttaggccacatgttcatgtacttcctgagaggcagtcttccttggcaaggcttaaaggctgacacattaaaagagaggtatcagaaaattggagacacaaaacgagccacaccaatagaagtgttgtgtgagaacttcccagaaaaggcg

SEQ ID NO: 1269 - DNA, 177 bp, Homo sapiens
  misc_feature (1)...(177): n = A,T,C or G
acggaacgttcaccatctgtcacaagacggaggtcatgangaacaccctcaacccggatgtggcaaacacttcatacatccccntgagggcntctgngcccccggagactatgacaggaccntcaaggnggaggtgnntaactgggggggtgacgncngctatgccctccattgggg

SEQ ID NO: 1270 - DNA, 172 bp, Homo sapiens
actgaggacttcctagtttggccacctacttgtcccagatacctcatccgtgttcttggataccatttccgacttccatctcctgctgtttctggtcaccaatgaagtcatgccgctgcaggacagtatcagcctgctgctagaagccgtgaggaccagaaagaaataaaaa

SEQ ID NO: 1271 - DNA, 158 bp, Homo sapiens
  misc_feature (1)...(158): n = A,T,C or G
taacattgaagaatactgngtnnaggnaatnttacctgtttttttgggacnnggntgaacgctgttattncttcttgaatgcttntgttggncncagctcactaaaaaggagcctgaatatgggagactggcgcagaatttgcttatgaaccctacaa

SEQ ID NO: 1272 - DNA, 157 bp, Homo sapiens
  misc_feature (1)...(157): n = A,T,C or G
aactgctctgctgtgnactctccaggcgtacactcggcaccccttgtttgagggagggttatgtgcccnatgtaaggataagttcctggagtncctcttcctgtatgatgatgatggacaccanagttactgcaccatcttgctgttcccggggggt

SEQ ID NO: 1273 - DNA, 145 bp, Homo sapiens
  misc_feature (1)...(145): n = A,T,C or G
ggaccgttcgtaggctnggaagcaaagacaagttgttgaaacgagaaggagatgatcgagtggaaccagggacccaaggatatgaatcattcagttatggtggggttgatccttacatgtgggaaccccaagagcttggtgagat

SEQ ID NO: 1274 - DNA, 144 bp, Homo sapiens
gacctggaccgtctgattgaccagaagctaaaggattacgaggacctcagggaagacatgagaggaaaggaacatgaagtgaagaaccttctagagaaggggaaagctgaacagcagaccgccgaccaactcctagctcgagcg

SEQ ID NO: 1275 - DNA, 142 bp, Homo sapiens
  misc_feature (1)...(142): n = A,T,C or G
gactgaggagctgtggccctcaaggaccttgtaattaaagaaaatgcattgcatgaattggatgtaccattcaaagttaaagttggtcatataggnanncttaaacttanaattncatggaaaaaccttcatactcaaccag

SEQ ID NO: 1276 - DNA, 141 bp, Homo sapiens
gactgaggagttgaagcagaagatggggtaaatttcttcacaccaaaaacaagctttacacagattttgatgaaattcgacaagaaattgaaaatgaaactgaaagaatttcaggaaataataagggggtaaaaaaaaaaa

SEQ ID NO: 1277 - DNA, 140 bp, Homo sapiens
gactgagaatattatggctcttcgaatcatttactttcaagtacacctgctacagattattttctgcaacagaaagactacttcgtcattttccttctgattttgcttcaagtcataataaactttatatttaagtagaa

SEQ ID NO: 1278 - DNA, 137 bp, Homo sapiens
  misc_feature (1)...(137): n = A,T,C or G
caacgccccaccaggggaccttcctacggcctgagccgngaggtgcagcgcgangattgngaagnanncctganagcggatctggagcagatncttatncagtggatcaccactcagtgccgcgaggacgtgggcca

SEQ ID NO: 1279 - DNA, 119 bp, Homo sapiens
ctgagggtaactgggatacttctggcagtgaactgagtgaaggggaattggaaaagcgcagaagaacccttttggagcaactggatgatgatcaataaattataccaaatataaaaaaa

SEQ ID NO: 1280 - DNA, 104 bp, Homo sapiens
taccttgatgcaattagaagaaacaaatacccagaagacaagcggcctgacagccatgatccttgcggctgctgtaactgcatgaaggcgcaaaaggaaaaaaa

SEQ ID NO: 1281 - DNA, 560 bp, Homo sapiens
  misc_feature (1)...(560): n = A,T,C or G
gactgaggactcagtgacgctttgaggttgtggctgtgaacttcacccaggaggagtgggctctgctggacacgtcccagaggaacctttacagagaagttgtcggggagatctttatgaacttggcctctgtgggggagagatgggaccagaatattgaagactggtacagaaatcagggcaggatcctaagnagccatattgnggagagacttantgacagnanacaaggtagccattgttgggaaaccatcagccanattcttgaccatgatctgaagaagaaaagctctcctggagtaaatctctgtgagtgcagngtgtgtggaccagccttcgtgccttgttcatccgggaagcccagcagtgcgcaggcgcacgctggacaggacgtacgtgactgcaaatgcaagcgatgtgagatagccttntgtaattactccttccaagtcaatggcaggtctcactgtgaagacaagcccaacgggtgtcaggaacgcgaggaagacttcctttctttccccagccttggngactttgntataactcgtactggggtt

SEQ ID NO: 1282 - DNA, 557 bp, Homo sapiens
  misc_feature (1)...(557): n = A,T,C or G
aactgaggcttggtgaaacccacaggnctgaagctttcctctctcgcctggcggtcccgcccaggcacggagcacctttggcatcccggcaggtggctgctctccccattcccccggtccactccaagatgggttagtgcttggccttctgcagaatctggctaccttgagccagttccctgtcacatccaccttcagcggcaagcagcaggcgcagttggtgtcagtcctctgcctccggtgcagcaccgcggccatgggcggctcagcttccagccagctggacgagggcaagtgcgcctacatccgagaatgaagggttgagggttggtgacacagctcactgggaaaggcactccctgaggccctcattccgattcttagagtccacctgatgaagaagagaactgactctcacaagttatccctgacttccacatggtacaatgctccccccacaaaccaaccaaccaaccaaccaaccaaccaaccaaccaacgtaatgcaagatttaaaagaaggcctagggaaatggcccagcaggtaaccatgctgtg

SEQ ID NO: 1283 - DNA, 556 bp, Homo sapiens
  misc_feature (1)...(556): n = A,T,C or G
actgaggcgggctggcagaagaggtggacgacaaggttcttcatgctgcatttatcccctttggagacatcacagatattcaaattcctctggactatgaaacagaaaaacaccgagggtttgcttttgttgagtttgagttggcagaggatgcggcagcagctatcgacaacatgaatgantctngagcatctttgnacggacnannngtgncantttgnccaanccantganaattaaagagggctnttccaggccagtctggtcagangatgactggttgaagaagttttctgggaagactcttgaggagaataaggaagaagaaggacccgagcctcccaaagctgaagcccaggagggagagcccactgcaaaaaaagcccggncaaatcctcaggtgtacatggacatcaagattgggaacaagccagcaggccgcattcagatgctcctacggtctgatgtggngcccatgaccgcanaaaacttccgctgcctgtgcacccatgaaaagggctttggcttcaagggaagcagcttccaccgcatcatc

SEQ ID NO: 1284 - DNA, 554 bp, Homo sapiens
  misc_feature (1)...(554): n = A,T,C or G
tgaggctgcgtggcttccgtaccctgcagccatatgctgagaggatccccatggtggcctcagatggtgtcaccatcaacttcacctcccagatctccctcacaggcccgggtgtgcaagtgtactacagcttgtacaaccaatcagacccctgccctggtgagttcctctgctctgtgaatggactgtgtgtccctgcgtgtgacgggatcaaggactgccccaatggcctggatgagagaaactgtgtctgcagagccatgttccagtgccaagaggacagcacgtgcatttcactgcctagagtctgtgaccggcagcccgactgtctcaatggcagtgacgaagaacagtgccaagaaggantgccctgtgggacattcactttccantgtgaggaccggagctgtgtgaanaancccaacccanagtgtgacggccagtcagattgcagagacggctcacatgancaacactgtgactgtggcctncagggcctctccagncgtattgtgggcggnaccgtgtcctccgagggtgagtggccatacagg

SEQ ID NO: 1285 - DNA, 549 bp, Homo sapiens
  misc_feature (1)...(549): n = A,T,C or G
gactgaggagggagctatggatttgctgcgggagctgaagaatatgcctattacattgcacttgctccagnccacccgtgttgggatgnctgncaatgctctgcgcaagcagagttcagatgaggagctcattgcacttgccaagtccctcatcaagtcctggaagaagctcttggatgtttctgatggcaaatccaggaatcaagggaggggcacacctttgcctacatcatcatcaaaggatgcctcaaggactacggatctcagctgcaagaagccagatccacctaggaccccatccactccaaggatcactacatttccccaagtgcccatcacctgtgatgctgtacgaaacaaatgccgagagatgctgactttggccctgcaaactgaccacgaccacgtggccgttggtgtgaactgtgagcatctgtcatctcagatcgaggagtgcatcttcctggacgtgggaaatactgacatgaagtacaagaatcgggtgcggagccgaatctctaacctgaaagatgccaagaaccctgggtc

SEQ ID NO: 1286 - DNA, 547 bp, Homo sapiens
actgagacagcagcagattggtgacaagaccgttcccatcccactgcggcgcctcccgagaggagtccggaacctttctgctgtgctgtcagcccggacatgctgaggcggagaccggaagccccttgtcggttccgggttttctgggctactacgatggctgatgagtttcgagtggccgtggcagtaccagcttcccgcccttctttacgttacagccgaacgtggacacccggcagaagcagctggccgcctggtgctctctggttctgtccttctgccgcctgcacaaacagtccagcatgacggtgatggaagcccaggagagcccgcttttcaacaacgtcaagctacagcggaaacttcctgtggagtcaattcagattgtattagaagaactgagaaagaaagggaacctcgagtggttggataagaataagtctagcttcctgatcatgtggcggaggccagaagaatgggggaaactcatttaccaatgggtttccaggagtggccagaataactctgtgtttactctgtatgaact

SEQ ID NO: 1287 - DNA, 546 bp, Homo sapiens
  misc_feature (1)...(546): n = A,T,C or G
gactgaggtggggtctttacttggntcggtcggcgaggctcacgcgagtgaagggcactgaggaaggaagaaggactcagagcatggcagaaaacagagaaccccgctgtgccatcgaggctgagctggaccctgtggagtacacccttcggaagcgacttccccaccgcttgccccggaggcccaacgacatttatgtcaacatgaagactgactttaaggcccagctagctcgctgccaaaagctcctggacggaggcactagggggcagaacgcatgcactgaaatctacattcatggcttgggcctggccatcaaccgggccatcaacatcgccctgcagctgcaggcgggcagctttgggtccctacaggtggccgccaatacctccaccgtggagctggtggacgagttggagccagagactgactctcgggagcccctgacgagggtcaggaacaactcagccatccacatccgagtcttcagggtcacgcccaagtaactgaagggaggctgacttggaccccaccaaggcttctgag

SEQ ID NO: 1288 - DNA, 545 bp, Homo sapiens
  misc_feature (1)...(545): n = A,T,C or G
actgagatgagtctgcatgtcttaaatgacgaaacgtgcccaatgaaaagagttcacagtgccgtgatttccagtttttgccaccagaacttaccggcagatcatctgttctttgtctgtcacagaaagaaaatgtaccaccccagagccaggctaaggccacaaatgtgaccgttccagacaccacctcgggatccacagacacacaggatcttaagtcctaacatgaccaataagcgtgaggctccttttggattacaaaatgaccactgtgtcttcttacagaaagaaaaccatnggcctttagccncagtggangnnnntcctgcggttcatanggnnactgagatnctangagcncagagcgagtnaccgganggaatnttgacttnctcannctttttagcttncacnattcttntgnacngtgagntggtgaccccttctatcgagccagtgctgcagccttnncatnagggactanaacctgtcttggattgtgagctggngacccctcctgttgagncagttgctggagcctacgt

SEQ ID NO: 1289 - DNA, 543 bp, Homo sapiens
  misc_feature (1)...(543): n = A,T,C or G
actgagactccgttgggtaccccaaaagagaatcgcacgtccacaccggtgcggagtccagggggatccacaatgatgaaagcagtggtccatgccgtggacggcatcgctgagaacgggatccagcctctaagttcctccgaggtggacgaactcattcacaaggccgatgaggtcacactgagcgaggcagggtccacagctgggccagcggagcctcggggactcgcagaggatgtcaccaggaccacgccgtccagaagggagatcacaggagttgaggctcaaccaggagaggccacattaggcccaccaggcatccagcccggtcaggancccccggtcaccatggtcttcatgggttatcagaacgtggaagatgaagcatnaaaccnagaaggtactgggcctgcnggacaccatcaaggctgaactggtggtgattgaanacncggccacgcccagggagcccgcacctctcaatggcagcnctgctgagctcccggccaccanggaggagaaccagacggggcccacgattcc

SEQ ID NO: 1290 - DNA, 532 bp, Homo sapiens
  misc_feature (1)...(532): n = A,T,C or G
tgggctttttggcagncaagaaccagaacagggccagcgggtctctggaattcttgttaaaagaaactttaattaccatatactctctccctgtgacctctccaattacactgacctggccatgagcactgtgaaacagacccaggccatcccgtacaccgggcccttttacctgctctactaccagctccagaaattgacgggtgatgtagaagaattagaaattcaagaaaagcctgctctgaaggtgttcaaaagcatcactgtggtgcaggagccgggcatggtggttctggagtggctggcgaacccctctaacgacatgtatgcagacacagtgaccaccgtgatattggaagttcagtcaaatccaaagataaggaaaggtgcagtacagaaggtctctaagaagctagagatgcacgtttacagcaagaggctggaggtcatgctccaggacatatttggagaagactgtgtcagtgtgaaagatgactccgtcctcagtgtcacagtggacgggaaggcagtg

SEQ ID NO: 1291 - DNA, 527 bp, Homo sapiens
gactgagtgttatcagaaagcccgccagcttcccattactgtgacatcggaggctggagaaaatgatgaaactgtccagactactctcaagtttacatacagtgaaaagtaccctgatgagactccactttatgaaatattctcccaggaaaatctagaagacaatgatgtctcagacattttaaaattacttggcattgcaggccgaggagaatctcggcatggtgatgatcttcaccctcgtgacagctgttcaagaaaagttaaatgaaatagttgatcagatcaaaacaagaagagaggaagaaaagaagcagaaagaaaaggaagcagaagaagcagagaagaaactgttccatggcacccctgttacgattgagaatttcttgagttggaaggccaaatttgatgcagaactcctggaaattaaaaagaaacgaatgaaagaagaggagcaagcagggaaaaataaactaagtgggaaacagttatttgaaacagatcacaatcttgacacatctgatacc

SEQ ID NO: 1292 - DNA, 520 bp, Homo sapiens
gactgagagcgagaaggcttgctgcactccagccacatctcagaggagctgaccacgaccacagagatcatgatgggccggtttgagcgggacgccttcgatactcttttcgaccacgccccggacaagctcaaccttgtgaagaagtctctcatcacgtttgtgaacaaacacctgaataagctaaacttggaggtgactgacctggagacccagtttgcagatggtgtgtacctagttctacttctgggccttcttgaagactactttgtcccccttcacaacttctacctgactcctgacagctttgaccagaaggtgcacaacgtggcctttgcctttgaactgatgctggatggaggcctcaagaagcccaaggcacgccctgaagatgtggtgaacttggacctcaagtccactctgcgggtcctttacacgctgttcaccaagtacaaggatgtggagtgatggagcaactgatcctccagggacaagtgctaggccagaaaaatgccactcc

SEQ ID NO: 1293 - DNA, 519 bp, Homo sapiens
  misc_feature (1)...(519): n = A,T,C or G
actgaggtagctgagacctatttccaggnaagaggactatgagaaagcaatgaaatttattcagcttgaaaggctgtatcatgagcaattgcttgcaaatctttctgccattcaggaacaatgggaaacaaaatggaaagctgtccagccacgtacagtgacgcctctgagaaattcagaaaagggatttaatggtgaagattttgaacagcttgctaaaatttgcacaactcaccaagaccctctcttgtccaagcttaagacancncctgtggaaccgncaccananaggaaaagccttgcaagggcgatantgtntgangaggcnnnggngacanaancancngccaaagagccagccntncctngnncnctccagagatggccacnngntctctgtgctctntnatattagaagtggtngntcggnaancctggaccntacntaanctttttcngngccgcctttngtatgccnncanagtctgccaanccnacatggggctcttcggcttctga

SEQ ID NO: 1294 - DNA, 518 bp, Homo sapiens
  misc_feature (1)...(518): n = A,T,C or G
actgaggttctctggcagagccattactgaagtcttggacctctatgctacatctcgagagagacggtttcgtttatttgcatctatagaatgtgaaggacagttattcatgactccatatgattttattctggctgttacaacagatgagcccaaatgaattaagtcagatgctctcagaaactccaccagtttggaagggatcatcaaagctttttcgaaatcttaaagaaagaggtgtgatttcttacacagaatatctttttcttttatgtattttaacaaagccccatgcaggttttagaatagctttcaacatgtttgacacgtgacggaaatgagatgntggataaaaaagaatttttggtgcttcaggagatattcaggaaaaagnatgaaaagagagaanctcctggagatgaagaaaaacgtgccatgctgcgtcttcaactttatggataccattctcctactaatagcgnccttaaaacagatgctggggaacttgtctcccctga

SEQ ID NO: 1295 - DNA, 515 bp, Homo sapiens
  misc_feature (1)...(515): n = A,T,C or G
gactgagagacctgctgtcatgccnatcccatacgcantactgancaagactcttctacgacaaatcctaagntttcaacattacagctggtcttcatgttccaccccactctcccagaccagccgttataccanagaacaagattatcgacctaaaacagcaggaaggaaaacacctaccttggcatccccagtcccaggaacaccttttctccgccctacccaccaagttccccttgtccctcatgttcctattgttcgacctgcacaccagcttcacccaggattagtccaaaggttgatagcccaaggggtacatccacagcatcttccaagtttgctccaagctggtgtgcttcctcctgggatagacatggctcctttacaggggctatctggcccactcctgggtcaacccttgtaccctttggtctctgctgctagtcaccctctcctaaaccctcgtcctgggacccctctgcatttggcggtgatgcagcagcagctacagcgct

SEQ ID NO: 1296 - DNA, 512 bp, Homo sapiens
tgagacggccatggctaccctccagcagcagcctaccagcaagtactccagcctgctctgcctgggcaggtccttcctggggcaagggcaagaggcccacgccctgtgcagaaggtcatcctgaatgactccagcccccaagaccaagaagagagacctgcacagagagacttctctttcccgaggctcccgagggaccagcctctaccgcccaccatctaatggagtggaagcccctgaggagtccttggaccttcctgcagagctgagaccacatggtccccaggctccatccctagctgccgtgcctagaccccctagcaaccccttagcccgaggaactctaagaaccagcaatttgccagaagaattacggaaagtctttatcacttattctatggacacagccatggaggtggtgaactttgtgaacttactgttggtgaacggcttccaaactgcgattgacatatttgaggatagaatccggggtattgatatcattaaatgcc

SEQ ID NO: 1297 - DNA, 510 bp, Homo sapiens
  misc_feature (1)...(510): n = A,T,C or G
actgaggtttctacccagtcaccacaccgnctgcttggtctctgcagtgcaccactgctttgatggtcccacaggtgaactggcccacgctttcttcccaccccacggtggcattcactttgatgacagcgagtactgggtcttgggccccacacgctacagttggaagaaaggtgtttggctcacaaacctggtgcactgtggcancccatgagattggccatgcactgggcctgatgcactcacagcaagatcaggcgctcatgcacctcaatgccacattgcgaggctggaaggcactgtcccaggatgaactgtgggggttacaccgactctatggctgcctggaccggatttttgtgtgtgcatcctgggcacgaaagggattttgngatgtccgccanaggctcatgaagaggctctgccccaaaagctgngatttctgttatgaattcccatttcccacggtggccaccaccacatcacccaccagaacgaaaacaaggttgg

SEQ ID NO: 1298 - DNA, 505 bp, Homo sapiens
  misc_feature (1)...(505): n = A,T,C or G
atgtgaagaggacatcagcangcagnngcncnctnctgancggaacccacatgtgacanntgtgaggnggcannnaangnnggcactgngcgnnnatgnaaccatctnantagntaccgtgcnangatgngacnttaatgcaggtaagcctccaagccacgacatgtttgattttcttcatctcacaggagggggctatgcaaagatctgcaaacccctccatgaactgatcatgcagttgcttggaggaaacaccggaggagaagcagaccaccattgcttgactggcccatcagtgttacagcatcccgcttcctcagatcagttagaccactggcactacagaatcctttcttaaggcactttgcattgtacaatgttcctggatgcttgtatgtttgaaggggaggagggatttaaattggncctgtatataaaggttttgtttgagaggagaaaaattagccaaggaagattcatttgaaaccagaaggggactttttag

SEQ ID NO: 1299 - DNA, 505 bp, Homo sapiens
tgaggcagtggcagcccagccccagccccagccccagcaatgtgccccatttctccaccatgttcttctatggctcaaatacctaaagcaacccaacctgaggtggatcttcctcaaagttctggaaacttcaaaaaagaagagctggctacacgcctgtcccaggccattgcaggtggggatgagaaagcagcggcccaagtggcagcagtcctggcgcagcatcatgtggctctcaatgtccagctcatggaggcctggttcccaccaggtcccataaggctacaagtcacagttgaagacgccacatcggttttgtcctcttcatcgtctgcccatgtctcactgaagatccacccacattgctccattgcagcccttcaggatcaggtgttctcagagttcggtttcccaccagctgtgcagcgctgggtcattgggcggtgcctgtgtatgcctgaacgaagccttgcttcctatggggtctctcaagatggagaccctg

SEQ ID NO: 1300 - DNA, 500 bp, Homo sapiens
  misc_feature (1)...(500): n = A,T,C or G
tgagcttccggagtatgggtccacgggcgctgcccacgccgacagtgagtatgagagaagaatgatgtccgtgtacagtcgcgtcctagaggaggtggagtcgcttaaccggaagtatgccccagnttcctacatgcacacagcatgcctctgcaatgccatcatcgctctgctgaaagttcctctttcatttcagagatactttttccagaaactacagtctaccagcatcaagcttgctctgtcaccttctccccggagccctgcagagcccattgctgtgcagaataaccagcagctggcactaaaggtagaaggcgttgttcagcacggatctaaaccaggcctcctccgcagagttcagtctgtgtgcctgaatgtttcctccacactgcagagtaaatcnggccaagactacaagattcccattgatagcnctgaccaatgagatggancananggntgagccacatnaatgactacntcaccacccagtctcc

SEQ ID NO: 1301 - DNA, 500 bp, Homo sapiens
gactgaggggccttcgagattgagatcaatggacagctggtgttctccaagctggagaatggagggtttccttatgagaaagacctcatggaagccatccgaagagccagcaatggagaacctgtagaaaagatcaccaacagccggcctccctgtgtcatcctgtgactaagaaatgattcttggaagcttggttctggggtttaaacctttccttgtggttacgctaggaatccctctacctttagcccctcacttggccctaggtaactaagaccctgacttcactttgcctcttagggcacaaggagggactagacatttctgtggccaaaggcagaaaagagatgttctctgtgaacatcaccatcgctctcccgggatctgtgccctctgcagtttggtcctctccccagcgtggcaatacctttcagatgccacggttgctataacttattttccctgaatcctgggcagtgtcggctcttggcaataaagag

SEQ ID NO: 1302 - DNA, 497 bp, Homo sapiens
gaggtggacagtggaattcggatgaccccatccccagaaaggatctggagcaaggtgtggtgggggcccatggcttgctctgccgcctctctgaccgtgtggacaagaaacttctggatgccgcaggagccaacctcagagtcatcagcaccttgtctgtgggggtcgaccacttggctttggatgaaatcaagaagcgcgggatccgggtgggctacacgccaggtgtcctgacagatgccactgcagaactcgccgtctccctcctcctcaccacctgccgccggttgccggaggccatagaggaagtgaagaacggcggctggagctcctggagcccattatggatgtgcggctacggactctcgcagagcactgttggcattgtggggctggggcgcataggtcaggccatcgctcgacgactgaaaccattcggtgtccagagatttctttacacggggcgccagcccaggcctcaggaagcagccgagttt

SEQ ID NO: 1303 - DNA, 497 bp, Homo sapiens
  misc_feature (1)...(497): n = A,T,C or G
tggaatatgagagattttaaccagtttatcaaggctaatgagaagtggggtcgtgatgatattgaaaatatagccagagaagtagaaggaaaaactccagaagaagtcattgaatactcagctgtgttctgggaaagatgcaatgagcttcaggacatagagaagattatggctcanattgaaaggggagaggcaagaattcaaagaagaataagtatcaagaaagcactanatacaaagattggacggnacaaagcaccctttcatcagctaagaatatcatatggtactaacaaaggaaaaaactatacctgaagaagaggatcgttttctcatttgtatgctgcacangcttggcttcnacaaggaaaatgtgtatgatgaattacgacantgcatccgaaactcccctcagtttanatttgattggtcttctcaagtccagaactgngatggagctccagaggaggtgtcataccttaattactttgattgaa

SEQ ID NO: 1304 - DNA, 494 bp, Homo sapiens
  misc_feature (1)...(494): n = A,T,C or G
tatgaaggactcaggacaccggctcatgccaaaactcatcccatcacaaagtcattttacatcaaaaatggcgttttccctaaccctcggcgatcagatgacatcatgtgacttgacttggaaaaggcctcagcggcntcctttcccccgtcaccatctggaccagccagatgggagatatttcggcccagccctacctcactccatgttctgctgagccctgcctncttgagtgagatggacctgaagaagtgaccacgggcatacacctctggggtgtactgtcatcctatgttggggctcctgtctacacacagagaactccgctgcttgcaaagctgtcgcgtcctaccatccgtcactagcaatgctgtttcttttcctggggtgatccaatgctgcatgagcaggcnctggacagaggaggcgcttgtgagcctgcaaggcncgtggncgagcaccaatcctnttangcctattcttctgcattagac

SEQ ID NO: 1305 - DNA, 488 bp, Homo sapiens
  misc_feature (1)...(488): n = A,T,C or G
gcgctcatatttacttacttgtgggcactctnanngtgtcggactggncgcntangatgncnccatntgagcnggagcagcctcatggtcacagatgctcacagagcngcagagcagcctgctggagacgctgcagagaggcgcaggacgggttggcgacagcgcagctacngactgcgcngagctcggccacgagaaggactcgctgcagcggcagctcagcatcgctctgcctcaggagtttgcggctctgacgaaggagcttaacttatgtcgggaacagcttctggagagggaagaagagatcgcagagctgaaggcggagcgaaacaacacccggctccttctggaacaccttgagtgcctggtgtccaggcacgaacgttccctgcgaatgactgtggtgaaacgccaagcccagtcccctggaggggtctcctctgaggtggaggtgctcaaggctctaaaatccctctttgaacaccaca

SEQ ID NO: 1306 - DNA, 487 bp, Homo sapiens
  misc_feature (1)...(487): n = A,T,C or G
gactgaggaatctgtgggctcctgtggccgacacacatgagggtcatatcaccagcgatatgcagctttctacctacttagaccctgccctggagctgggtccccgtaatgtactgctgttcctacaggacaagctaagcattgaggatttcacagcatactggnggngtgnntggaaananncaggacagtgcnantttctaacctgnagaatgccctggacttggccccctnctcactggngcttcctgctgtggantggtatgnaataagnactctgancacctacctacanganaagcttggggctagccccttgcatgtggatctaggtaccttanagganctgaagctcaangccagccttcctgccctgctgctcatccgtctgccctacacagncagntccggnctgatggcgcccagggaggncctcacaggtnacgatgagggcatcggacaggcactgancacactcatgtatgaa

SEQ ID NO: 1307 - DNA, 469 bp, Homo sapiens
actgagcttcccctctgccccatgagaaacatcttcaagaggaaccaggagccaaatgtggctccggccaccaccactgccacaatgccccttgcacccgtcgcacctgccgacaactctacagagagcacgggtcctggggagagccaagaagacatgttcgccaagctgaaggagaaattcttcaatgagatcaacaagatcccctgtgagtggccctgtggccaggagggttactgggctagcctggaaagcctatgtcaggccagaggaggcggggagccactgggctgggatctgctggcttctttctttgggtctcagtttggatttccaccccagaggcatggcttgggagtgtgatctggaattgaggaagccaccaagggagtttatgttacacatcccaagctatagaagccaagttcaatttcaagtacaacctgaaatccctcctcaaaaaaaaaaa

SEQ ID NO: 1308 - DNA, 461 bp, Homo sapiens
  misc_feature (1)...(461): n = A,T,C or G
ccgacagttatttatgcaaaacagctgaaagagagattggaggcttttacaagagattttcttcctcacatgaaagaggaagaagaggtttttcagcccatgttaatggaatattttacctacgaggagcttaaagatatcaaaaagaaagtgattgcacagcacatgctcacagaaggacacggcagagctcctcagagggctcagtctgtggaaccaagctgaggagcgacagaaagttctcaagtactctgtggatganaaggcagatacagaagcggaagtgtcagaacactccacaggtataacccatcttnctcctgaggtaatgctgtccattttcagttaccttaatcctcaagaattgngtcggngtagncaagncagtactaagcggtctcagctggtaaaaacaggatctttgtggaaacatctttaccctgtncattgggcaagaggtg

SEQ ID NO: 1309 - DNA, 457 bp, Homo sapiens
  misc_feature (1)...(457): n = A,T,C or G
gctaaatgctggcccntggggggactacctgctganattcttcttgggccnttatcanntgcgtcnttggnggcnangaaggagattgatccagngcctgnnctttattctnatggacaggggactgacacaccgnacgtncccaatgagagtctaggagaggcagcctgtgctggcaattgtggaacgcttgaccaacctcatcaaggaagtctttccagacactaaagtctatgctgctctgggaaatcatgacttccaccctaagaaccagttcccagcacagagcaaccgcatctataaccaggtggcagagctgtggagaccctggcttagtaacgaatcctacgctctcttcaaaagaggtgcccttctattctgagaagctgccgggtcccancagggcggggcgagttgtggncctcaacaccaatctgtcgatctcgcaagcacaaag

SEQ ID NO: 1310 - DNA, 453 bp, Homo sapiens
  misc_feature (1)...(453): n = A,T,C or G
ttgtacttcctccagtcacacaatgccgncgccttcggacatcagtgaaggtggccatagaatggcctggcgcctaccctaaactcatggagattgaccagaaaaaaccactgtctgccattataaaggaagtctgngatgggtggnctcttgccaaccatgaatattttgcactgcancacgctgatagttcaaacttctacatcacagaaaagaatcgcaacgaaataaaaaatggcacgatccttcgattaaccacatctccagctcagaatgcccancagctccatgaacgaatacagtcatcaagtatggatgccnagttggaagccctgaaggacttggccagcctctcccggnatgttacctttgctcangagttcataaacctgggatggtggagaattcccaagccacagcccttttgtctcgggganctcccttcttcacaga

SEQ ID NO: 1311 - DNA, 451 bp, Homo sapiens
  misc_feature (1)...(451): n = A,T,C or G
aaacagcaggatacattanttgtttggtcagaagctgaaaactatgatctggctctaagttttcaagaaaaagctggcttgtgatgaaatttgggaaaaaatttgtcaagttcaaggtaaggacccatcagtagaagtcacacaggacctcattgatgaatctgaagaagaacgatttgaagaaatgccngnggctagtcatctaattgacctgcccgcatgtgaactcagtaaacttgaagagattgctgacttagttacctcagttctctcctcacctatccgtagggaaaagctggctctggccttggaaaatgaaggctatatcaaaaaactactacagctattccaagcttgtgagaacctagaaaacactgaaggcttacaccatctgtatgaaattattanaggaatcttattcctaaataaggcaacacctttttgaggcaat

SEQ ID NO: 1312 - DNA, 448 bp, Homo sapiens
tcccgcttacgcagacctcatccatagcagtggctggagccgtgattggagctgtcctggccctcttcatcatcaccgtctttgtgactgtgttgctgacgcctcggaaaaagagaccgtcctatcttgacaaagtaatcgaccttccacctacacataagccaccccctgtatatgaagaacgaattccttctctccctcagaaagaccttcttggccaggtacgtgctctcgaagacacttaaagtcaccagaactagcttctaaacaccttgcccagctgttgtggcacacatctgcaaacctagcacctgagagagaggctggagcaggaccaggagtttaaagtcagccttggcgacactgagtttgagacctgcctgggctactggagaccccattgcaaaatttgaagtgaataaattttttaaaaatccaaaaaaaaaaa

SEQ ID NO: 1313 - DNA, 445 bp, Homo sapiens; identical to SEQ ID NO: 50
  misc_feature (1)...(445): n = A,T,C or G

SEQ ID NO: 1314 - DNA, 439 bp, Homo sapiens
  misc_feature (1)...(439): n = A,T,C or G
tatatacctgaggagaanaggattcccnagcctaccggncccctgcgccctccccggccagcgtgaacctattacagatgtggcagncatcgcctagggcacatgggcgaggaggtgccccagggctatacatgcattcagacttctgcgggtggccaccccttggagctcagtgctgggctcctgggtggaactcaaccagtcatctgctaccgcagggggcgtgacaagccccccctcgttgagctgggggtgttatatgaagggaaggaacgacccatncttgggttccaagtgcttgacacgacaccgtatagccactcagccaatctggccccttcaggccccgggcacccccgcacctacctcatgtatcggcggncagnaaaaggggcagggcctgcatgccctgggcatcactgacctctgcctggttctg

SEQ ID NO: 1315 - DNA, 439 bp, Homo sapiens
  misc_feature (1)...(439): n = A,T,C or G
actgagcatcacaatggggctgcctctgagccctgcagctgactctgcccgctccgcaaggcacgccctgtctctcatcgccacagccagaccacccgccttcatcaccaccatagctaaggaggtgggcagncttcatcacgtgntccatcgcccctttcagaggagttcctccgggccgnaactctggggtcaggacccagcagcagaatccttatanntcaagcaaagcaagntaaccgttnacggcatgaaatgaatggatcatgtgtgcacgcaccctgagttccgcatntgngggagtgtgctnncgtgctcctttctgtnctnagaatgaacacacttagtgacaatacctttcagtatgaagtgcaataggtctatgagaagtagaagatattaaaggtattcacactgntnaagtgtaagcaaaaaaaaa

SEQ ID NO: 1316 - DNA, 438 bp, Homo sapiens
  misc_feature (1)...(438): n = A,T,C or G
ccatcgggcaggcgggaaacccggaagaaggacgggatngctgtgagtgagattgngagtgaagcgcctggaagcngcagaaccctgctctgcaggatggacccagccctgtctgctgtccggctcaccgtgcaggaagccattcacaccctttcatcctcagaggatgctggccatatcctttctaccctggggactctgaaacgatacctnggtggaaccgaggatccagttcttcctgaggagaaggaggagtttgccactgcccacttctcagccgtccttagatgtctggncagcangctgancccaggttggctggagctgncccccggtggtgcagnntgnagcggttttggnagagctnnttcctggatggccctccanaccaagccttcctggngctgatggaagccattgcgagcactgctggcgcca

SEQ ID NO: 1317 - DNA, 437 bp, Homo sapiens
  misc_feature (1)...(437): n = A,T,C or G
tgtttctcagcctcagcaaaaccatggtatccttgttagtaatattacagagtcattgtctaccaaatcatgtggagcaccgcgacctgtcaatggagttgttaacaggtaatgttttagctcttctacttctaaaacgtaatactcttataaatgtggaatttgtagcccctagttattcccagccaagattggaaaaaccctaccactcattcatactttgtatgngggtatactataaagtatactttatttagtatgttcatgcaatcccttgtacctaccattgtctaaaagggactggccatggagtaaaacaaagtcctacaaantatttgaaggntnttaataggatccatgagcatatnantacatattatccttagaatncattatttnatagaaactgtgactgcntnattaatatttgcaaaagt

SEQ ID NO: 1318 - DNA, 434 bp, Homo sapiens
  misc_feature (1)...(434): n = A,T,C or G
gcaggaaccgagcatcacagaagaagaaaactcggaggacgantctgacgagaagngctntggctacggtgaccacagaagcattagctgaaaatgtgaattctacccacaccaacgacacctcaaaccaggtggaatttatattaatgggggcgaannnannggcaagancagannancctnnnattcatggcnctcatngcgactctactgngngggcaagagaccnaagcaagagccntntagccaaggatctcaaagngccttgcagacacatgaactnggaggngaaacccngaaagtccctanttttgaagaggacacaccctctgncnatggaaatagagatggaagagaccgataaaanggatgaacagngtgaacagaaacgncgacnatgagtgnntanctacttngaaggaccaaaaggaacc

SEQ ID NO: 1319 - DNA, 433 bp, Homo sapiens
  misc_feature (1)...(433): n = A,T,C or G
gtacccatgccccaccctggctctnagtgggcacagctcggacaggcttgaactttgaccttggggacaaggtcaggtnccgntgctnctcctnaaatatggnnttgactggctctgcanagnngggagtgtcanagcaatggagtgtggagtgggncggaacccatttgccgacagccttactcttacgacttccctgaggatgtagcatctgccctagacacctccctcaccaacctgnttggagccancaatcccacccagaaccttctgacaaaaagtttgggccgnaanatcataatccagcgntcgggtcacctnaacctatatttgctgnttgatgcttntcagagagtgacagaanangaatttgacatcttnaagaagagtgccgaactnatggtggagagggtcntaaacttaggggtacatg

SEQ ID NO: 1320 - DNA, 432 bp, Homo sapiens
  misc_feature (1)...(432): n = A,T,C or G
ctcttttggcccttgtggtaaatacaacgcgatggtgctggaactgctgggaccgagtttggaggatttgtttgacctctgtgatagaacattttctcttaaaacagttctcatgatagctatacagcctgatttctcgtatggagtatgtccactcaaagaacttgatatacagagatgtgaagcctgagaacttcttaataggacggccaggaaacaaagcccagcaagtcattcatatcatagattttggtttggcaaaggaatatattgatccagagacaaagaaacatataccatacagagaacacaaaagccttaccggaaccgccagatacatgancataaacacacatgtaggaacnagagcagagtagaagagatgatttanaanccttacgccacatgctcatgtncttcctgcgaggcccg

SEQ ID NO: 1321 - DNA, 432 bp, Homo sapiens
  misc_feature (1)...(432): n = A,T,C or G
accccgagcgccaagtgacacccggcccatcgcgccggaaggatattctcggcgcggagctgctcgatggtggcctcgcagcgccggagcttgctcctgcagcgtccgcatcgcccaccccgttctcgtcgtcgtcgtcgtcctcttcctcctcgtcgtccttgaaccgggtgtgaacgggcttcggcgtcgactcctctggtgggtcaaacgcctcgaagagctctaggtcgccaaaatccacaccggccgccatcttgggctgtgggaaagcttggagggcagggggcgaaggttggaggccagagccgntctccctggaggcttttctccacacacaggcctccaaagccgtntaggggcgggtcctggacggagactacaactcccagaatgccaaggccgccctcatgcctctttccgaatgggcca

SEQ ID NO: 1322 - DNA, 427 bp, Homo sapiens
  misc_feature (1)...(427): n = A,T,C or G
gactgaggtaggagtataatggctgtccaggtgctgcggcagatggtctacttcctactgagtctgttttctctggtgcaaggtgcacacagtggcagcccccgagaagacttccgcttctgtggccagcggaaccagacccaacagagcaccctccactatgatcaatcttcagagcctcacatctttgtgtggaacacagaggagaccctcacaattcgtgcctgtnngctgncagtggtgaccgtgttccnanctgggnatagttgtatgantcctcnanacacacantnnannctgtgtncctgngactgtganntncnnatnntgnnntagtggggntcttgatgnncttngctanctgntgtatacnttnggactgtnacttgcacagctgtgctcantangagagatggccatgctcccg

SEQ ID NO: 1323 - DNA, 411 bp, Homo sapiens
  misc_feature (1)...(411): n = A,T,C or G
aagaagcgagcagaagnacagggagaagaagaggaagaacancaagacgangctgtggacgaacttgtnannggatagtcagnggnnaangcagtggcgggngcnccaggccgaggctctgnccggcccctcactggatcagtggcacagatcatctggngaggacaatgatggcccagncctgacngatgancngaantctcntatgcaggccatgaaacccatgacaaaggaggantggnatgcccnacngagcgntattcnaaaggtgntggacccanagacnggacncacaaggntnatnaagggagacggcgaggttntagaggaaantttnaccaangaacgacacatatngatctgcaagctagccacccccaggggatgggctggcctttcagatgcgaacag

SEQ ID NO: 1324 - DNA, 409 bp, Homo sapiens
  misc_feature (1)...(409): n = A,T,C or G
ggtttgaagaccatgaaggcagcaaagctggccaagatgaagataccacccggtgagatgttcctgtcagaagtcaacaagtattctaaatttgatgaaaatggtctgcctacccacgacaccgaaggcaaagacctgagcaagggccaggccaagaagctgaagaagctctttgaagcccaggagaaacctgtacaaggagtatctgcaaatgttacagaatggcagcctccagtgatgccacggcagcccaggaggggcgcacctgccagcctggctgctatggactaggccacagctactgaggctccgtgccctgatcatgttnacagctgttctcacacctgaatcaggcagagnggtagcagntctgggacactgataataaattcttctgaacggtgaaaaa

SEQ ID NO: 1325 - DNA, 403 bp, Homo sapiens
  misc_feature (1)...(403): n = A,T,C or G
tgtgggtgatgctgttgcagccgagctgctgaacattctccgtggactcttccctgccacaccttgcccatcagccgagataaaatggaagactcctacaaggataggacttcactgatgaagggtgccaaggacattgccaaagaggtgaagaagcagacggtgaagaaggtgaatcangcagtggaccgggcccaggatgaatacacccagcggtcctacagtcggttccaggatgaagaggacgatgatgactactacccacctggcgaaacctacagtggggaggccattgatgacnaaggctcaagtgaggccactgagggtcacgacgaggaggatgagatctatgaaggggagtaccagggcatccccagncangaaccaagggaaggacagcatc

SEQ ID NO: 1326 - DNA, 401 bp, Homo sapiens
tgaggttccaggtgacaggggtatttatgaagaactgggactcgctggatgagcagggcgtttgtgctgctgacaaggactgtgaagatgcgtataaagtttgtcagatcttagacatccctttccaccaggtgtcctatgtgaaggagtattggaatgatgtgttcagtgactttttgaacgagtatgagaaaggaaggactccaaaccccgacatcaactgcaataagcatatcaagttcagttgcttttatcactatgctgtggacaatcttggagcagatgccgttgccactggccactacgccaggacctcactggaggatgaggaagtctttgagcaaaagcacactaagaagcctgacgggctgttcagaaatcgatttgaagtcagaaaccgc

SEQ ID NO: 1327 - DNA, 401 bp, Homo sapiens
  misc_feature (1)...(401): n = A,T,C or G
actgaggtacaagtagctctgggggttccgttccaagcccagccgacggagagtctcctcctcgcccccctccagtagctggtaaaagacgtggaagttccgctctccgtgattttggtgcaccacccgggacttttccaggagccacgtnctgntgctttaaccttgaaaacacccagaaccaacctctgntcatcacctctacgtctagcaccctgatctganaggccgtcatgccatctgncaggtagctacattacatgggcctcctaaccggttcccctgcttggctgtgntcntntgnnatctactcccaacgacnggcagaatgaccttttgagtaggaaagttacatcactacacgactgctcaaaaccctctgatagttccttttcacttag

SEQ ID NO: 1328 - DNA, 399 bp, Homo sapiens
  misc_feature (1)...(399): n = A,T,C or G
aaagggtctggggcatngctcatggnatccagatgccctcagtgcntatgtgcccanctgtttggcagcncgnactgtccagttctcactggccctggcactgtgtatngagtgtgtgcangaactgccaccttccacctgctgcnggntgtgcctgctagttctgnctacactcncccaccaaccctcnggcacngctgnatancagcttctggagcctcaagctgntnnncctgntangnctctgngncntagccttntgcatccctgangaggatctcttcccnggctggnattatattggcatntgnggaggctncacattnatcctattacaggtggtgcttatcacagtntttgcccagccctggaacaagaatnggtagactggcgcagctc

SEQ ID NO: 1329 - DNA, 389 bp, Homo sapiens
  misc_feature (1)...(389): n = A,T,C or G
tggaaaataagcgagnngccttttttcctccattacatcaattttgcatcaatccaaaaaaccctgttacagtaattcgcggtcttgcgtggagctcttaagttagatcttggacttttctctaccaaaactttggtagaggctaacaatgancatatcgtagaagngaggacccaattgttacagccagcagatgaaaactgggatccctctggaacaaagaaaatctggcgatatgaaaataaaagttctcatactacaattgctaaatatgcacagtaccaggcctgctccttccaggaatcattgagagtaagtttgttttacattcactttgggaaaaagaccattaagagaattttaataaagtatttcacttgtacagggaa

SEQ ID NO: 1330 - DNA, 387 bp, Homo sapiens
attgaggcgtggccagtcgactgctggggccatcgttcgagccttacctgttgccggaactgaccagatatgactgtgaggtgaactgtgcccgtgcctggaagctccacactcctgcaggggagagaccttctcagagctctggaccaggccacctgagccagggcctctggccgggcatgcccctgcctgccccgccgtcttgacctgccagcttcacttccatctgtgttgctattaggtatctctaacaccagcacacttcttacgagatgtactcaacctggcctactggccagatcaccaagcagtggcctttatctgacatgctcactttattatccatgttttaaaaatacatagttgttgtacctgcaaaaaaaaaaa

SEQ ID NO: 1331 - DNA, 386 bp, Homo sapiens
actgaggctggctttgaactcactctgtaactgaagaacttataaactgattctgactccctcaagggctgatactgcaggcctgggtcattacatacagtgccgaggactggatccagggcttctttcatgctggactcttttccaaagccagtgatctcacagtctgaaccaaacggagcatcagtaaaccttgggggcaggcagatggtctgtatggacctggatggctgtgcacattggcccgtgctggatgcccacgctgtgcatgttactggcttgcctgaattccaggaacttcccttgtggtctaaactggctgaagtttctgttgagagtgataaataagaaagcaaatgcatatgatttcattattaaaaaaaaaa

SEQ ID NO: 1332 - DNA, 381 bp, Homo sapiens
tgagctgctagctgggaaagaaggtggctgtggctgactatgtggaaccttctccccgaggcaccaagtggggccttggtggcacctgtgtcaacgtgggttgcatacccaagaagctgatgcatcaggctgcacgtgctggggggcatgatcagagatgctcaccactatggctgggaggtggcccagcctgtccaacacaactggtgagagagaagcccttgccctctgcaggtcccattgaaaggagaggtttgctctctgccactcatctgtaaccgtgagcttttccacccggcctcctctttgatcccagaataatgactctgagacttcttatgtatgaataaatgcctgggccaaaaaccttaaaaaaaaaaa

SEQ ID NO: 1333 - DNA, 378 bp, Homo sapiens
  misc_feature (1)...(378): n = A,T,C or G
ttgcgacctcatcaggcagtgcggngtcataaatccagagaccaagaagatctgtacacgcctattgacttgcaagatccactcagtgcaccagcgcagggaggtcccaggcagggccaaggactttgatgtgctagtggccgaactgaaggccagctcccgaaaaggagagtctcccaaggagaagagcccagcacacaaagagccagctctggagcgcccatcccaggagcctcccactgcagtccagggtgtggcagaggtggctgcccccaacaccaccttctcttntctgtctaagcanacctatncgtactgtgcactccccaggctgctgccgctttttataactttatattatttttttttaagaaaaaa

SEQ ID NO: 1334 - DNA, 362 bp, Homo sapiens
  misc_feature (1)...(362): n = A,T,C or G
tgagagctgttggggatggtggcagtatttccaaaggaagaatatcttctctaaaagcacgggctgttttgattgacatggaagaaggcgtagtgaatgaaattctccaaggcccactgagagacgtgtttgatagcaaacagctcatcactgatatctctggctcgggaaataattgggctgtgggtcacaaagtttttggatgtctttaccgggaacagattttagagaaactgcggaagtcggcagagcagtgcgattgcttacagtgcttcttcatcatccactccatgggcggaggnaccagcccntnccantcagcttccttcaaggaggagcccattcncaaacagcccctattg

SEQ ID NO: 1335 - DNA, 357 bp, Homo sapiens
  misc_feature (1)...(357): n = A,T,C or G
ttggtaaaatattttgtttatttggaccaaagaagaatcctgaagctcacatgaatgttagccgagattattaaacactgggattatccaagcgaagaatatgaggttgtgactgatgatggttacattcttccaattaaccgaattcctcatgggaagaacaatgctaatagttcagccccaaagatggtagtattttgtcagcatggcttgcttgcaacacctggtgcatgggtttccaatccgcctgtcaacagcctggccttcatcctagcagatgctgggtatgatgtgtggatgggaagcagcagaggaagtncctgggcaaagaaacacgtggccctcaacccagattct

SEQ ID NO: 1336 - DNA, 346 bp, Homo sapiens
gagtgccacccggaagcgcggtttccccaggcagacgcgtttgaaacacttcttgcagaagaagctctctggcagctgcgcaccctcaacaggtttcgcatcccagccttcgagccctcgagtcggaggaagacctgacacccagcctccagcgtcacacctctgtagaaccccagacaacaaagccactgcagacagcgccagaggcgacgaaagatggctgtcagcttctgttaacgatgacgtggatacggatgaggagtcagcacagctcagagggtccaaaagaatcggtgacggcttcccgtttgatgaagaaagccccagtaaattccgtatggtagga

SEQ ID NO: 1337 - DNA, 334 bp, Homo sapiens
  misc_feature (1)...(334): n = A,T,C or G
agtagaagaagatgaacccacagcatttggcngaagataaagaagaggaggatgtctccagtgaaccagaagcttcactccagtgcagacacaactattctgtttgtaaaaggagaagattttccggcaaacaacatcgtgaagttcctggntggntttacaaacatggggacagaagattttattgntgaatcgctagatgcctcgntccgttancctcaggactaccagttttacatncanaattncacagntcttcctctaaacantgtagtgccaccccagcggcaggctcccttttgagnattccttcatccctgcagagccgatggga

SEQ ID NO: 1338 - DNA, 333 bp, Homo sapiens
  misc_feature (1)...(333): n = A,T,C or G
tgctgccgtttaataaatcctccctgttagctgtgaannanctgnnatattctcaatagcctcctgttcctttcaagtgagctcacaaattctctatgagctgcagaaaggccaagcgctcatcacctttganaaggaagaagtcgcacaaaatgtgatatcgatggggaatcatgtcgtgcagatggaaggcaccccagtgaaggtctctgcacacccagtcccactaaacacaggcgtcagattccaggttcatgtggacatttctaaaatgaagatcaatgttacgggaattcccgatgagctgtctgaggagcaaacaagggacaaact

SEQ ID NO: 1339 - DNA, 326 bp, Homo sapiens
gactgaggtatcatgagctcattacaaaatatgggaaattggagcctttggcagaagtggacctaagaccccagagcagtgcgaaagtagaagttcacttcaatgaccaagtggaggaaatgagcatccgcctggaccagacagtagccgaactgaagaaacagctaaagaccctggtgcagttgcccaccagcagcatgcttctctactactttgaccacgaggccccgtttggcccagaggagatgaagtacagctcccgggcactgcactcctttggcattagggatggagataaaatttttgtggaatcaaaaacaaaataa

SEQ ID NO: 1340 - DNA, 311 bp, Homo sapiens
  misc_feature (1)...(311): n = A,T,C or G
agggctgggagcctgcaccctgactggagntaccctgatcttcttgctactccccagaagtctggagagctgtggacacatctgagatttcaccccctgttgtccgcctgggggaccctgtcctggcctcttgcaccatcagcccaaactgcagcaaactggaccaacaggcaaagatcttatggagactgcaagatgagcccatccagggnggggacagacagcatcatctgcctgatgggacccaanagtccctcatcactctgnctcactngaactacacccaggccttnctcttctgcttaaacgcc

SEQ ID NO: 1341 - DNA, 309 bp, Homo sapiens
  misc_feature (1)...(309): n = A,T,C or G
agtgggtttgctgctgatgtacancctgngcanggccgaantnctcnttggggaactctcnnggncgggcagntatanngagctnttatatgnganacattcggacttttttactaggaaatangaaaaagacntctacgtggnggagcacagtancaggctgcctcagcgtgggaagccctgtttatttccggtcaggtgctcaggagtttggagagcccggatggcggaaacttgttcataacagacccccaaccatgaggccggagggagagaagctggctgcctncaccttgaaagtgaaagaaa

SEQ ID NO: 1342 - DNA, 308 bp, Homo sapiens
  misc_feature (1)...(308): n = A,T,C or G
cgcaccccacggtgcnccattacgtaatgtncctncaccagaaataatggngttgccggtatgaaagccgaggccgagccagtggcacagccatggactcacntnacccagagcttgaaggctcttcactgcgcccaccacngnctggngctccacacccagctgcgtanccaactccgcgctgnccagaccgtcntnagttacctncagacggcgtagtaacagntacaaaangggantatccgcctatggcntactcccagcnntgcttggcgtgngcaggccagncggacctgacataggggacc

SEQ ID NO: 1343 - DNA, 302 bp, Homo sapiens
  misc_feature (1)...(302): n = A,T,C or G
gtccttgacacccgatcatgtatgacagttttgacaacacctatcaggcaacaattggcattgacttcttatcaaaaacaatgtacttggaggatagaaccgtgcgantgcaattatgggacacagcaggtcaagagcggttcaggagcttgattcctagctacattcgagactccactgnggcagttgtngtttatgatatcacaaatgntaactcattccagcaaactacaaaatggattgatgatgncagaacagagagaggaagtgangtnatcatcatgctagcaggaaataaaaca

SEQ ID NO: 1344 - DNA, 297 bp, Homo sapiens
gactgagattccatgtattcagttatcctgagctcacgtacagcagaggatacccccgagtttcaccgccatctcttactaggattccaggatccctttcaaggcttctacctggagcaactgcccacagttctgccttaagagtgcctgagagacctggcatcgtcacagcctgccctccaaatcatcacctcactctgccaggcacaccaggtcttcctccccttcctcgccgcaccaaagaaatcaaaacccaaactgaggtatcagaaacatgtttttttttttttttttaaa

SEQ ID NO: 1345 - DNA, 290 bp, Homo sapiens
  misc_feature (1)...(290): n = A,T,C or G
actgagtgggccatgcagtgttggccatcaatggcatggcacgtgaatggcaagtacacggctgacgggaaagaagtgctggagtatctgggtaaccctgcgaattacccggtttccatccgattcgggcccccccnggggggggnnnnnnnnnnnncccgcccttaccttcttaatggaagaaaggcctttaatngcccttgggcccttcggaatggtttcccacttccggcttcttttgggccatttggggttccccagcttatcttcccgggaacaagggggccaag

SEQ ID NO: 1346 - DNA, 287 bp, Homo sapiens
  misc_feature (1)...(287): n = A,T,C or G
actggaagattgctagctactttaagaggacatgctgctgaaatatcagacatggctgccctananaaggattntgaggnggttggtgnganttgtgataaaatgantccgtgtctggtgtcttcgaacctgtgcacctttggctgttcttcagggacntagngcatcntattacatcactacagntctcaccattgtgcagngnctnaaaganatacctgttttctacaggggccggactggcactattngcattttgnnttttggaatgctggaacccttaaaat

SEQ ID NO: 1347 - DNA, 286 bp, Homo sapiens
  misc_feature (1)...(286): n = A,T,C or G
ctggagttcctgtgttcttccnaaatgcattgctggctganagtgtgagcatgtgcttacagactgngccaacagagggagccagtaacagnactgaattaccacagggaacaaaagatgagccttaccggccatcatgataaccagaaaatttaccaggacttggtgggccangtgaaccacctactaagtaacgcctcccaagaaaccgaagaaccacctaccaaagcggtagttaccaaccgtgaatgcgcnaagacccaaaatactcaccatgcaaggaaaa

SEQ ID NO: 1348 - DNA, 282 bp, Homo sapiens
  misc_feature (1)...(282): n = A,T,C or G
tccccagagctggaaggtggctctggccgctgccatggtgagtggtgtcgccatagtcgtggnaatgacaccctttgatgtagccagcacaagactttataaccaacccactgatactcgaggcaagggcctcatgtaccgnggnatnttggacgctctgctgcaaacagcgcggacagagggcttttntggcatgtacaagggtataggtncctcctattttcgcctcggcccccacactattctctccctcttcttctgggatcagctgcgctcctttta

SEQ ID NO: 1349 - DNA, 263 bp, Homo sapiens
gctctgagtgggcagtctcacttggcaataaaagatgacaagaagcaccatgatgcagagcgccacagaggtgagaggccgggcaagccagattaagctttgctcccatactcagacagtgctgcagagctgtgcctcgctgtggaaagcccaagccccacacagagagcaaacagtgagataacaggagctgtctgtcgcaaagcttgctttccactgacactcagttcaccctgccactctgcaaggtttgccttgggact

SEQ ID NO: 1350 - DNA, 258 bp, Homo sapiens
  misc_feature (1)...(258): n = A,T,C or G
ggccgacgcgcagaagcaaactgatgagcttggtcaacagcacagaagggaaagtggacaaagtcctcatgagaaacctctttatcggtcatttccacacacctaaacaccagcgtcacgaagtccttcggctcatggggagcatcctgggtgttaaaagggaagagatggancanctgtttgcacaatatcaaggaggtgnnactcggnggatggctggatggctggtcaggaggatntnaaaagtgagcccaatac

SEQ ID NO: 1351 - DNA, 231 bp, Homo sapiens
tgaggtaacatgaagagtgaggaatctaacaaagcaaaattcttctgagatggactatttagaaaatgccactgtaatagatgaatctgctttgacacctgagcagaggctaggcttgaaacaagcagaagaacgtctagaaagagatcacatcttccgacttgaaaaagtatgctatgctatgttagttacctgagggagaaatatatgctttatgacttttcctacact

SEQ ID NO: 1352 - DNA, 221 bp, Homo sapiens
  misc_feature (1)...(221): n = A,T,C or G
ctttatcattcagtgtacanatgagcangaatgngaacatcccacagttggcggacagtttgtttgaaagaactactaacagnagntgggtggtggncttcaaatcactcattacaactcatcatttgatggngtatggaaatgagcgtttcattcagtantnggctncaagaaacacattgttttaacttaagcaatnnttttggataaaagtggattgc

SEQ ID NO: 1353 - DNA, 221 bp, Homo sapiens
  misc_feature (1)...(221): n = A,T,C or G
aagaggatgatgagaagtctgacagtgaggatggagacctggataagcagatgggcaatctcaatggcgaggaagctgacaaactagatgagaggctttggggagatgatgaggaagaagatgaagacggtgacggtagagcntgaanagacaggaccaggggtggatgaggaagattctgaacttgatgctaaagatgacagcgttggatgctggaaatt

SEQ ID NO: 1354 - DNA, 211 bp, Homo sapiens
gctggctttgaacctgaagtcttctggtcccaacctcttgagcccctgttaggattacaggcagcacaccggccctggctccctctggtattttaattgagactaaattccattggaactgcttatggatagagggtggcttgacattctcttaagagtgccgagctgtttttcacccaagtaaaaagtcttgtctttgcaaaaaaaaaaa

SEQ ID NO: 1355 - DNA, 200 bp, Homo sapiens
gactgagatttttgcttcagtgtcttgaggatcttgatgccaatctacgaaaattaaattctcgtctgtttgtgattcggggacagccagctgatgtatttcccaggcttttcaaggaatggaacatcacgtaaacctctcaattgagtatgattctgagccttttgggaaggaacgagatgcagctatcaaaaaaaaaa

SEQ ID NO: 1356 - DNA, 197 bp, Homo sapiens; identical to SEQ ID NO: 51
  misc_feature (1)...(197): n = A,T,C or G

SEQ ID NO: 1357 - DNA, 194 bp, Homo sapiens
  misc_feature (1)...(194): n = A,T,C or G
caagcatgcacaaacgaagtaccgtgtcctgaaaattgatagaacnttaaccgagggacnaggaggtaatcgacgacaggcacgtntacacacaacaagaagtgagggaacttcttggccgnctggatctgggaaacanaacanagatgagccagaaaggatcctnngngttgttttagagccgtactcagtat

SEQ ID NO: 1358 - DNA, 189 bp, Homo sapiens
  misc_feature (1)...(189): n = A,T,C or G
agcatataggcacgctttcactaaccttacatncagnacnagantanagntgaaaatgcngaaactcaattnannacaattggntggccatattatgaagttttaaaggatgantgaaagaaggcagaggnatgatgatgttctgancaanggacttccagattggcgacagcctgtattctactacag

SEQ ID NO: 1359 - DNA, 187 bp, Homo sapiens
  misc_feature (1)...(187): n = A,T,C or G
ggctccaccagcaggcatggngctggactgnncccaagcctggctattgngcctgcccatagctgnggngtacaggctcgntggccctcttcacctccatcctgcacaatgtgttcctgctgtactacgtggacaccttcgtctcagtgtataagatcaataaagtgtccttctgggttggagagaa

SEQ ID NO: 1360 - DNA, 174 bp, Homo sapiens
gactgaggatgaagtaagggaaaatatagctcgtggaatggcaatcctgggccccacattcactcttgacgctcttgtggaatgccttgtgattggagttggcaccatgtcaggcgtccgccagctggagatcatgtgctgcttcggctgcatgtcagtgttgaaaaaaaaaaa

SEQ ID NO: 1361 - DNA, 171 bp, Homo sapiens
  misc_feature (1)...(171): n = A,T,C or G
tgatcacaagtattcaaangaaggcattgtatggcagctcatgagggatctctgtgtccagggccacagctgtttcgnaagtccagcactgagcgacattacagatagngtggncacctcctcccagcatccctggaataaagtctactttatcatttgcataaacaaaaa

SEQ ID NO: 1362 - DNA, 170 bp, Homo sapiens
  misc_feature (1)...(170): n = A,T,C or G
cccccccgcaccttttgtggagttgnccgagccgcttctttgcacttcctatggatattctctgttgcaaggcatcaaaaaaggactgaggaatgtggaacaccaggggttctggtttgcctgcagaaaaaagaagaatgtcatttaaataaacatggttgttttcttga

SEQ ID NO: 1363 - DNA, 169 bp, Homo sapiens
  misc_feature (1)...(169): n = A,T,C or G
aacatgaaccagcgcacagcatgttggacggatggngaggcccgtacagggtgagaagttctcnttctgnatcctgacacctgacaaggaacattttatcagggcagaatccaaggagatnatcanngggtggttagagatgctcatggttgtatccttcgaaccaaca

SEQ ID NO: 1364 - DNA, 169 bp, Homo sapiens
  misc_feature (1)...(169): n = A,T,C or G
ctggtggactactccaagaaaccttgtgaacaaggaggtgatgcagatgctggcggagctggccaagtccagaggcagtggaggctgnacgggacaacatgttcagtggttccaagcatcaactacaccgaggatctgggcggtgntgnatgnggcccttcgaaaccgg

SEQ ID NO: 1365 - DNA, 166 bp, Homo sapiens
  misc_feature (1)...(166): n = A,T,C or G
gtcctggccttcacgggctgtggcgggctacatcacctacctgtccatcgactnggctctgttngtggagacgctgggcttcctggnctgtgcatgactgaagccatgctgggggtgccacagnatgaacctgaaactacttggcaccgctccacggagggcatga

SEQ ID NO: 1366 - DNA, 163 bp, Homo sapiens
tgtgtcaaaacccaaagctggcgctcaagcaacagcccgccttatatcttagacctgctgcctgacacctaccagcacctccgcactgtcttgtcaagatatgaggggaagatggagacgcttggagaaaatgagtatttcagggtgttcatggaaaaaaaaa

SEQ ID NO: 1367 - DNA, 162 bp, Homo sapiens
  misc_feature (1)...(162): n = A,T,C or G
gcaccatcatccaacaagcgacccagcaacagtacaccacccccaacacaactcagcaaaatcaagtactcagggggaccccagtattgtcaagaaagaacgacgccaaagctccttccccatangcacagaactgaananagagggactctgagaaaaaga

SEQ ID NO: 1368 - DNA, 160 bp, Homo sapiens
  misc_feature (1)...(160): n = A,T,C or G
actgtcccacaacctacttcagacgctngncatcgggctcctggcgaacctttcagcactgntggagctggacttaagcaacaataggatttctacattagaagaaggcgngtttgctaatttatttaatttaagtgaaataaacctgagtgggaaccca

SEQ ID NO: 1369 - DNA, 149 bp, Homo sapiens
  misc_feature (1)...(149): n = A,T,C or G
tttcctggattcatcaccaaggnntgnacctggaatggcggcagtaactatcaggcaaaccgacagacttctaactacaattcagccaaaatgtctactccaattgacaagtccttgcgaaaatttgaaaataaaatcaatctaaataa

SEQ ID NO: 1370 - DNA, 141 bp, Homo sapiens
  misc_feature (1)...(141): n = A,T,C or G
aaataccatcttgtccgagcaatattggagtcaatagcttttcaggaacaaacagnctgtacnacatgcntgnagagagaaatccagattcccgtcacgaacatccgggcagatggaggcgtgngtaacaacgctttcgtc

SEQ ID NO: 1371 - DNA, 135 bp, Homo sapiens
  misc_feature (1)...(135): n = A,T,C or G
atgagagcctggactatgacaacagcgagaatnagctgttcctggaggaggaaagaccaatnaaccncacnganttccggacagtggagatnatgcgctgggttatnatgngccctcattggaatcaaaaaaaaa

SEQ ID NO: 1372 - DNA, 110 bp, Homo sapiens
  misc_feature (1)...(110): n = A,T,C or G
gatagatttaaaggggaaccccatggcagaaagaagacagctgtttgcagagttgagggctcaaganctgnatcgcntncgactctccacctacagaacagcatgcaggc

SEQ ID NO: 1373 - DNA, 107 bp, Homo sapiens
gactgaggcagagaaggtgctgcagtttgacccaggcaaccaagaatgtgacggctctgctgatggaagcccgggacctggaagcccgggtcatcatcctttctgca

SEQ ID NO: 1374 - DNA, 102 bp, Homo sapiens
  misc_feature (1)...(102): n = A,T,C or G
aagtttacagtcacaccgtcgcccatctatcatatgtcgntgngacattacttccacttgggtttcatattctgtaaatcgaacaaagtcaaacccttctga

SEQ ID NO: 1375 - DNA, 422 bp, Homo sapiens
  misc_feature (1)...(422): n = A,T,C or G
ggcccctgggacctaactggaagaaggagctggcaaacacccctgactgtcctaggatgtgtgcctataagctggtgaccatcaagttcaagtggtgggggctgcagagcaaagtagagaactttatccagaagcaagaaaaacggatatttacgaacttacatcgccagctcttttgttggattgacaagtggattgacctgacaatggaagacattaggcgaatggaggatgagactcagaaagaactagaaacaatgcgtaagaagggttccgtccgaggcacgtcggctgctgatgcctanatgaggcccctgtnggtcagagacattatcagactgtctacggagtcaaggccaagtgagggggaccagtgcggcctgtgatgactgaagccaccancgtctcagtgttggacgttt

SEQ ID NO: 1376 - DNA, 280 bp, Homo sapiens
  misc_feature (1)...(280): n = A,T,C or G
tgagatagcaaccagganacaaaatctcatnatggccaatgtccaccaggaaanngaagagatggagcagnccctgcagantggacaggaagaccgccctgtgggaggaggtgagggccaccancctgctgcaaacaacancatcaacaacctcaaccataacnacaancaccaccnnagaggccaggctntgccagacttgcccntaacttncnangggccattcccaacaggcagatgaatgacgggttgggtggagatggagatgatatggaaatgt

SEQ ID NO: 1377 - DNA, 121 bp, Homo sapiens
  misc_feature (1)...(121): n = A,T,C or G
ctccgactccagcagcagtagcagctccagcgactcagtaggcagaggggaaggagtatgccgntggntgcnagaagcatgaacgctcctcagacaaggccaagaaacccaaggtgaataa

SEQ ID NO: 1378 - DNA, 516 bp, Homo sapiens
  misc_feature (1)...(516): n = A,T,C or G
gttttgagacaacgtgatgagctttngagtatcaaacctgcngatgctgctggntttnntnngccggagcaagaatgggctgaagcacgaactggtgaccagggccttgcagctggtgcagttcgactgtagcccatagcttttcaagaagatcaaagagctgtatgagactcgcatatgccaagaagagtgcngagcccggcccacaggcaccacggcccctggatccnctggnactacactccatgcccaggactcccctgtcagggcccaccgtggactaccccgtgctgtacggnaagtacttgaatggactggggcgcctgcccaccaagacccttaagccggaggtacgcctggttaagctccncttcttcaacatgctggacnaatngctnaagcccactgaactggnnccacanagngcagagaanctgcnagagagcccatgcatgtttncgctaacacctaggcnggtgnagatgatccnaaactncagggagctgcagcctggag

SEQ ID NO: 1379 - DNA, 398 bp, Homo sapiens
  misc_feature (1)...(398): n = A,T,C or G
gaggtgtgaagaagagacggnagaancncaggaggagagacnggacgcgggaccgagcagntgacaggattcagtttgcctgttctgtatgcangtttngtagntttgaagatgaagaaantcaaaagcatctgcntagtaaatttcacaaagagactttgcgattngataagtaccaaactgcccgacaagacagtagaattcctccaggagtacatcataaacaggaataanaaaattgagaaacngngtcaggagttgttggagaaggagagccctaaacccaaaccagatccattcaaaggcatnggccaggagcattnccttcaaaaagattgaagccgcacattgactagcctgtganatgctgattcctgcgcancgatcagcttctccag

SEQ ID NO: 1380 - DNA, 478 bp, Homo sapiens
  misc_feature (1)...(478): n = A,T,C or G
ctaacttgccgttcgcttctcccgcatgagaatggcatccacacgatcgatgtcaagtttaacgggagccacgtggtcgggagccctttcaaagtacgtgtaggagagcctggccaggcaggcaatcctgctctagtgtcagcctacggtgctgggcttgagacgggcaccacaggtatccaatcagaattcttcatcaacaccactcaggcaggcccagggacattatctgtcaccattgaaggaccatccaaggtcaaaatggattgccaggaaatcncagaggggtacaaagtcatgtacactcccatggcctcctggaaattacctgattggtgtcaaatatggcgggcccaaccacatctcgaggagtccattcaaggccaaggtgacaggccaacgtntggncagcccaggctcagccaacgagacctcctccatcttggtggagtccgcanccagatcctcaacgtaaacg

SEQ ID NO: 1381 - DNA, 382 bp, Homo sapiens
  misc_feature (1)...(382): n = A,T,C or G
ggaaaggataatgaatnganttctaagtacagccagtgacctgntcggangacctgttcatagtgcatgactttgacgtgaaaattgacttacaggttccaagctcagagtcaaaagctttggccattacctccaaagccccaccagccanggaccggagcgtccgaggagatctctgaacttagaagactacaaaaaaccgacgggggcttatttgagcacttccagcctgntgcttccaaccctgnatgccccgccatcgnnctgcctttnctcttttcctntgattngccctctttgggctggagcaacagtggaactgggaagagactctaaactgccagtcattgtaatataaaccatttactgtataaaaaaaaaa

SEQ ID NO: 1382 - DNA, 473 bp, Homo sapiens
  misc_feature (1)...(473): n = A,T,C or G
tttttttttttgtattgtaagnanaggagctgggtaaatgatgcctacaagaagaangattttgacaaggccctgaagcattatgacagagccaaggaactggaccctaccaacatgacctacataactaatcaagcagctgtgcactttgagaagggcgactataacaaatgccgggagctctgtgagaaggccattgaagtgggcagagagaaccganaggactaccggcagatcgccaaagcttatgcccgaattggcaantcctatntcaaagaagaaaagtncanggatgctatacatttctacaacaagntctctagcagagcaccgaaccccagatgtgctcaagaagngncagcaggcanagaaaattctgaaggaacaggagcgcttggcttatatcaaccctgactcggctttggaggagangaacaagggcaactantgcttccagaaaggggactactccc

SEQ ID NO: 1383 - DNA, 448 bp, Homo sapiens
  misc_feature (1)...(448): n = A,T,C or G
ggttcggaaccacgttgctgcactggtccccaggggctgcttcctcgatattctgagagccaagcagaaggacaagaacagctcttcaagctaacggacaacatccaggatgagttcttcatagccgnggagaacattgatagctactgcgtgctcatctcctctaaagctgtgtactttctgaagagcggggactacgtagaccgagaggccattttcctcgaggtcaaatatgatgacctctaccactgtcttgtctccaaagaccatgggaaggtgtatgtgcaagtaactaagaaagctgcacattctagcagtggcgtgtccatcccaggtccatcccaccagaagccaatggggcatgtgaaatctgaggtccttgctgtcangntatcacaagaaataccctatgcnnagagcctctactatgaacagcaacttatgttaa

SEQ ID NO: 1384 - DNA, 400 bp, Homo sapiens
  misc_feature (1)...(400): n = A,T,C or G
ccaccagtatcgttacggagtacaacacctntgacctggagatcatcatgcgtctgangncnggactnttcntancatnaanagnntctacngnnatcaangtgncccagcgngttcatgacaatggctgcagagatcaaaaagcggatggggccaggagcagcgtctgggggtgaacggcccaacctgaagatcgacagcacccctgtgaagcctgctagccggtggctgctgctaggaggggcacttgggggagggcaccttgtccagatgatgcccctggagcgggcaggaagtgcctccctctcctagggcattcgagtctgtanctttggggtgtccctggnctccccatcttnctttggcccattctgncttcnngctctgagacccagtcctg

SEQ ID NO: 1385 - DNA, 315 bp, Homo sapiens
  misc_feature (1)...(315): n = A,T,C or G
tgaggaatctggccaactgtgagcgcctcattgaagtggaggatatgatggtgatgggccgcaagccggaccccatgtgtgtcttcacctatgtgcagtcgctctacaaccaccttcgtcgctttgagtaaagccggcggcccggagtggccaggaagagactctgaggtccctcacgttccccccatggcagcatgatccacacngagggaagctgcctctctggtgtgagctgctattcgctctctggcgtgtgaccatgtgcccctcacactcgttactgattaaaagtattgatgaggctaaaaaaaaaaa

SEQ ID NO: 1386 - DNA, 448 bp, Homo sapiens
tgagtgttctcgccccccagcagtcaagattctggcttggtctccctctccagcagctctccgatgagcaacgagagctcgaagggagttctggaatgtgagtctgcgtcctcggaacctagcagctacgccgtcaaccaggtcctggaagaggatgaggacgagtgagccgccgccggggctactctggtcacagggtgttaggccggcttgttttgttatcggcagggtttgttgttatttgaattggcagtgctggctgcccattcagaagtttggttcatgttagagttaggttaaaacacttgtaacagtgtaggatcccagactaccatctgcaagaagtaagtgcctggctcaccaagtttaaacagtaatgagactcgctcccttgcccagagcctgtccctttcccttccttctccactgtgttggtttttttttttcg

SEQ ID NO: 1387 - DNA, 414 bp, Homo sapiens
  misc_feature (1)...(414): n = A,T,C or G
gcttttacaagtgctcttatggacttggtgcatggagtataccaggagaactctgcttccaccaaggaaaattctatcccagatgatattggaatctcgacctggaaggagcagactttcctgtcccattgtgccttgctagcgaagagctgccaggctgcaatggagttagcaaagcatgatgctgcggtccaagacatggcattccagtatgggaagcacatggccatgagtcacaagatcaatgctgacctncagccttttattaaagacaaggccagtgactctaagacttttaacctaanctcagcacctgtngtcttacatcaggagtttcttggaagagatttgtggattaagcagattggagaggctcaagagaaaggaagcttgaactacagtaaggcgtaagaa

SEQ ID NO: 1388 - DNA, 495 bp, Homo sapiens
gaggaaacactgacagcacagctggcagagaaaaatagtgagcttcagaagtggagagaagagcgtgaccagctggtcacagctgtagagacacagatgaaggctctgctctccagctgcaagcacaaggatgaagaaatccaggaactaagaaaggctgcagcaaagagcaccgggacagaaaaccaaaccatgaatcccaagcctgaatataatgattccgttgatcttggtggagttgaaactgaacctcagtcaacaagtttggaaatttctaggaacacagcagaggacggatctgtagttcttgactcttgtgaagtgtcaacagaaaatgtacaaagtactcgatttccaaaacctgaattggagattcagtttacacctttgcagccaaacaaaatggcagtgaagcaccctggttgtcccacaccagtcacaattaagatccccaaggcacggaagaggaagagtggtgaagtggaggaggcctgc

SEQ ID NO: 1389 - DNA, 280 bp, Homo sapiens
tgaggctttggtcttccttgtgactggaattattttcatgatgggaagcatggcgctcattatactcgactggatctacaacccgccgaatcccaatcaccactaatcccggggagacgcgtctccactggaaacagctgaaattgtctgaaggacattttagttgtcttgattgggatgttagtctgaggaattagcaagattccaaagacgtttttctagctctatcatgggatacttgtggaagagaaaattatgggttttgttgggaatggttttg

SEQ ID NO: 1390 - DNA, 434 bp, Homo sapiens
  misc_feature (1)...(434): n = A,T,C or G
tttacacctaaaccccagggactggataaagagccaaaactgcctccaaagttggcaggcccgctacacaaaatcatcaccacaacgaatctccaccctgncaagatcgtgatgcttgtgagtgagaaccctctgctggcagacgcagctgctctcggtaaatgctacagggtgatggatttgatctgtganaaatgcatganacaganagacatgaatgaagngtnggctatgaaaatgcactacatcancatgcatttttnagaaatgcattacctttctcaaaganggagagaatnagctggacaccctgatcanangcttgntgaaaggccgancgnctgatggctntncggngtattnggaanngatcatcagagaaagcatccggaaggtnnccatactgngaagcgcacactcctacagaatctggt

SEQ ID NO: 1391 - DNA, 543 bp, Homo sapiens
  misc_feature (1)...(543): n = A,T,C or G
tgaggtacccgctccagacaagcccctatcatgtggactccctgctgcagctcagngatgcctgccgctttcaagaggatcaagaganggctcgagaccttatagagagagccctgtacagcatggagtgtgcattccaccctttgttcagtctcaccagnggaacgttgcaggcatggattatctgcagacctgagaataggagcgttctacctgaccctctacaagcagatgagtttcttggagaaacgtggatgcccacgtactgcgctggagtacatgcaagctcatcctgagccttgagccagatgaggacccnctgagcatgnngctgcttattgaccacctggccttacggncccggaactatgaatacctgattcgcctcttncaggaatgggaggctcatcggaacctgtcccagctcccanattttgccttcncagttccactggcctatttccttntgagncagnaaacagacttacctgagcatgagctcaggtctgccaggcaacaggcttccctcctgatacagcaggc

SEQ ID NO: 1392 - DNA, 554 bp, Homo sapiens
  misc_feature (1)...(554): n = A,T,C or G
gattgagtcgacccccgtaccaatggaagancctgcagcagccgnnctggcccatgaggactgccctgccatcgaccagccagccatgtctccagaagacaagagcccaatcactcccggaagccggggtcgcatacagccgggaccgagcttgcttccttgtcacagactatgccccttcccctgatggctccatccgaaaagccacntggtgctcccccactgccccccccatgctggcataagccaggccccccaagcttcttgcccgacctcaacgccaacgcagcagcctggatatccccctagnggacgagccccttcccccccaggcttttgtnaccgnntgagacctagcgagaccctcgggttncccctgtnccttccccccangttacgagaagccccgcancctgagcagnattgagggcctgagcggggngtncctgcncctngcgcccctcgccacccccnctggntctccccgggccacgcgccgagctcccccgaccctgccctccatcctntagcgcagccctcccccctgggggggc

SEQ ID NO: 1393 - DNA, 294 bp, Homo sapiens
  misc_feature (1)...(294): n = A,T,C or G
gactgtgttggtattgcaagagccatcactgctgtcctcactccaggacaatggactgacagatgtcatgctgcatgcactgctcatcaaagatgttcctgctacaagggaagtcctcggttncctcccaaatgtattcagggcactttgcttgaatgcccgaggncttcagtcttttgtacaatgncagccatttgaacgtctcttcaaagttcttctgnctcctgattacctnncagccatgcggaggangaggagttntgatccccttggggatactgcatccaacctgtc

SEQ ID NO: 1394 - DNA, 499 bp, Homo sapiens
  misc_feature (1)...(499): n = A,T,C or G
ttgagggcacacctcagtactccagccattccagcagcaacaccctctccagcaacgcctccagcagccatagtgatgaccgatggttcgaccccctggaccccctggagccagagcaggaccccttctccaagggaggttcgagtgacagtggcatcgataccacagctctacacctccagccccagttgcatgtccctagccaaagcaccgaggcccaccaagccacacaagcctcccggaaatataggtctttgtggcgggggccgagagtcggccgggagaccccaccctgtggacagacggcgggaagtgtcccctgcacctgtggtggccggccagaacaagggctaccggccgaagctgtactcttcgggctcctgcactcctccaggcctggtggggggcagncgagacccaccaaggcaacccaggtgagaacccacacccctaatttgagatccttctccaaaatacacttgcttgataactgcgaaaa

SEQ ID NO: 1395 - DNA, 443 bp, Homo sapiens
gactgagggctcggcatggcatacactgtccacaagtggtcagagctcagctgggccagtcactgggtcacttttggatgctggatcttctaccgtctcataggctgaggcatatgaccatcataatccccttcaatacccctccttagggtgccaactctgatgggggatgagaaaagaccctttctctactccttttcccttatccattcttgacccccaacacccctccacacaacataggaacacacacaactttctatgcctgtcaatcctcaccccgccaccaggcaggaagggggtggtccttattgggccaaggaacgatggatacttgggaaagcagacaggagcagatccagggcctctgcgcctgccgtctcccttttttatatgcagtttgttattgtcgaataaaagtagaacttacacaacaaaaaaaa

SEQ ID NO: 1396 - DNA, 181 bp, Homo sapiens
  misc_feature (1)...(181): n = A,T,C or G
attgaggttacagtcctgagaagtatgacataaaatgtgccgtgtctgaggcagcgataattttgaactcgtgtgtggagcccaaaatgcaagtcactatcaccctgacatctccaattattcgagaagagaacatgagggaaggaggtnggaaagccaattanacattctactttactgt

SEQ ID NO: 1397 - DNA, 400 bp, Homo sapiens
actgaggcttggagttactggtggagaggcaattagcagtgcttctagtcctcaaagccctggagatgccctgagaagagtatttgagtgcatttcttcagggattattctcaaaggcagccctggacttctggacccttgtgaaaaggatccctttgacactttggcaacaatgactgaccaacagcgtgaagacattacatccagtgcacagtttgcattgagactccttgcattccgtcagatacacaaagttctggggatggatccattaccacaaatgaatcagcgctttaacatccacaacaacaggaaacgaagaagggatagtgatggagtggatggatttgaagctgaggggaagaaagacaaaaaggattatgataacttttaaaaagtt

SEQ ID NO: 1398 - DNA, 509 bp, Homo sapiens
  misc_feature (1)...(509): n = A,T,C or G
ctgaggtctctttggctcttcagggntgcggggncccatgatggacttctggttaaccaaacggagctgtttgtgccatccctcaatgtcgatggacagcctatttttgccaacatcacattgccagtgtataccctgaaagagcggtgccttcaggttgtgcggagcctggtcaagcctgagaactacaggagactggacatcgtcaggtcactctatgaggatttggaggactacccaagtgtgcggaaggacatacagcgactgagccaagagcaccttgagagtcagcacctggaagaggagccttgaaggagtccatggagattaagtgttcctgagtttcagccttgatggtccgagattgatctacacataggacaggtcactttctttcagttttaaaatggttcattcttggagtaaaactatccatcacgtaaaagaaagttaactaacatccctgggctttgtagtgtttaagaataaacatgcaaagtgccattgat

SEQ ID NO: 1399 - DNA, 475 bp, Homo sapiens
  misc_feature (1)...(475): n = A,T,C or G
gaaagcttggccaacctctcagcaagatgaatattattcggaagaagaaagaaatgctaaagcagagaaggaaaagaagcttcccccaccacctcctcaagccccacctgaggaagaaaatgaaagtgagccggaagagccgtctgggcaagcaggaggacttcaagacgacagttctggagggtatggagacggccaagcatcaggtgtggagggtgcagctttttcaaagccgacttccccatgaccgaatgacctctcaggaagcagcctgtttcccagacatnatcagtgggcctcagcagacacagaaggtttntctgttcatcaggaatcncacattgcagttatggcntggacaacccaaagatccagctgncnttagangncactctccagcagctggaagcgcntttacaananccgatacttgtnctttgtccaccgtagtntcacagnttacttacaagcgcca

SEQ ID NO: 1400 - DNA, 352 bp, Homo sapiens
  misc_feature (1)...(352): n = A,T,C or G
ggtagaccgtaacttcaggtattttcaatgatgcgctaccaccctgtggatcggtaacagagaagggtattagaaacatttcttctccagagatttctgcagaattcagtggacagactgacattagaaaagagaaccaagaactaagtatgaataaaggcactaatttagacaaagaaaacagctggcataatggccagtgtaatcagtacagaagaacagagaaacaaacaaaactcatgaagaaatgtcctaagaagcctgcnttggaatataaacaaacctctcaaaaagtatgttcctgcatcagccaagtaccccgcacatctccagaaggagaaagaagaaaaaa

SEQ ID NO: 1401 - DNA, 295 bp, Homo sapiens
  misc_feature (1)...(295): n = A,T,C or G
tgacaaacggttgttggtcggtanatctctgcagcacctggagcagaagcaaagtaccgaagtgcttnaagcacttccagtctatttagctccagcagccagctctttcctccttctcggctccgctataatagatctgacatcatgccctccggccgcagtaggttattggaagatttcaggaacaaccgcttcccnaaccttcagctcagagacttaattggacatatagtcgagttttctcaagaccagcatggttncagattnatacagtaaaagctagagagagctacat

SEQ ID NO: 1402 - DNA, 288 bp, Homo sapiens
gaactgagttgagaataccactcactgtgaatttgcttacctgcgggatctccttatcaggacgcacatgcaaaacatcaaagacatcaccagcaacatccacttcgaagcctaccgagtgaaacgcctcaacgagggcaacagcgccatggccaacgggatcgagaaggagccggaagcccaggagatgtagatgcgtcccgcccctggaccccacccccagatcttttcatcatccctggcccacccacctaccctgtcttattttatataattatctccttgtca

SEQ ID NO: 1403 - DNA, 513 bp, Homo sapiens
gactgagcttcgcccagggcccattgaaggatgctccaaatctcatctgcacaccacacacagcctggtacagtgaacaagcatcactagagatgagggaagcagcagccactgagatccgccgagcaatcacaggtcgcatcccagaaagcttactgaaactgtgtcaacaaagaattcttcgtgacttcagctccttggtcagtcattgaccagcaagcaattcaccccgagctcaatggtgccacatacaggtatccacccggcattgtaggtgtggctccaggagggcttcctccagcgatggaagggatcatccctgggggcatccccgtgactcacaacctccccacagtggcacacccctcccaagctccttcccccaaccagcccacaaaacacggggacaatcgagagcaccccaacgagcaatagcagagaatgcctgaagctaatccgataaacttgggaccaagagacagtagaaaacggatgaatttgatggtcttttaa

SEQ ID NO: 1404 - DNA, 106 bp, Homo sapiens
  misc_feature (1)...(106): n = A,T,C or G
ctaggaaaagactacgtgatactcttacaagagaaangcannaagattgagacgganctcaagaacaagatgcaanagaagtcacagaagaaaccagtaacctcga

SEQ ID NO: 1405 - DNA, 511 bp, Homo sapiens
  misc_feature (1)...(511): n = A,T,C or G
gactgagggggattttcaggctacttatgaagttccagctggataaccaggacagcccttcctacattggactttcttttcaagatttttaccagcagtgtagggaagcattccttgttaacagtgatctcacactccgagcccagttaactgaatttagggaccacaaacttataagaacaaagaagggaacntgatggtgtagaatatttattaattcctgttgacagcggaatattggctgatttcttggagaaggaagaggaggaggcataggctgtctcttatccttgaactttctgtggaagcctcattgtggcccagctgctgctcctcagtaagaatgctggtttacatccaacattaggtcattctctccagcatacaagatgttctatggaagaggcatagcatcaatttgaactttgattagcctggctggtgtactgtctctaatactatgcagtggtcgttgagttggataaaagtgcctttaatttaaaaaaaaaaa

SEQ ID NO: 1406 - DNA, 114 bp, Homo sapiens
gagagctctgattatacaaaaccaggagaaactgaccctacatctgtcacaagtcccaaagatccagaagatataccaacatttgatgagtggaagaagaaagttatggaagta

SEQ ID NO: 1407 - DNA, 156 bp, Homo sapiens
  misc_feature (1)...(156): n = A,T,C or G
tgagaggtttatagtccttgaagagaatgncangtacgcagtagccgnttacaagctaagcaacatgcccagcccaaccagccagactctccgcaagaaacccagataattcaggccaagaagagaaaaacagcacaggatgtcaaaaaaagaaaa

SEQ ID NO: 1408 - DNA, 549 bp, Homo sapiens
  misc_feature (1)...(549): n = A,T,C or G
tttgagatgaccagaattctgtatatggcttcggaacctggtacacagtggagccaccaaaggggagatctcatctacacaagatgccatgatggaggagatattcagagtggtgtgcatctgtttgggcaacccaccagagaccttcacctgggagtaccgagacaaagataaaaattaccacaagattggccccataacacccttgcagttttacaaggagcacgtgaagccgctcttcaatatggaagataagatttgntntgngaatgacccacggccccagcacaagtacaataaattgtacacagtaggactacttgagcaatatggntggagggagaaaaacgctgnataacatgccagcccattgacttnttgaaaaagatggttgctgcctncatcaaagatggagaggctgtgtggttnggntgngatgntggaaaacacttnaatggcaagctgggcctnagtgacatgaatgtctatgaccatgagttagtgntcggngnctccttgaagaacatgaataaagctgagaggttgtca

SEQ ID NO: 1409 - DNA, 269 bp, Homo sapiens
tatttcatgagcctcttttcctagagctcccagcggcagcattgcacaggcttctccccaagcccgcgccaggttatcccgcgctccgcctcccgccctgcaaacccaggcagtgaagcactgccttctgtaccggtcaagacgactccgggacaaacagggggcccacggttcgcaccagggggctcggtcataacgacagtggtgcagtctgagatgcgtgtcgccgacgacaataaaaacaatagctcactccagcaaaaaaaaaa

SEQ ID NO: 1410 - DNA, 431 bp, Homo sapiens
  misc_feature (1)...(431): n = A,T,C or G
acaacagtgccacagccacactggagacacgtggananggggccnattgtnacagngacgtgnntccctgagcctgncgattgcnnnagtgntnnnatgctggatgatgnatgaccatgangntnaacangcagntgcagacagtcaacaacatacattccttgttcagcctggcagtgtgcagatctcatcataggggcgttctctatgaacctttacaccttatacatcatcaagggctactggcccctgggtgccgtggtctgtgacctgtggctggccctggactatgtggtgagcaatgcctntgtcatgaaccttctcatcatcagctttgaccgntatttctgcgtcaccaagnccctnacctatccagcccgcccggaactantnagatggcaggcctcatgattgcagccaaaaaaaaagct

SEQ ID NO: 1411 - DNA, 383 bp, Homo sapiens
  misc_feature (1)...(383): n = A,T,C or G
actgagaggacccaagagactggcacgnggcnncccccaggcagacnggtggancctggggacntgantcatactnactnnctncccacgtcaaggccngtccttcaggatgaccgncgtaccggaaagacnggaccacacttntccaggcctttgnnnaccntcnncncaccaggctnactctcaagctcctcctccngctcgcatcctctcggggtaactggnctcctngtcggagtcctcttcgtctgcctctttttgcagggtctttttcgtagattttttggagtttatattgcttttgagtcgtatagaaaatggaaaataacattctggagatactaaaagctctgggagtcgcagagagaaaatgttacggaaaa

SEQ ID NO: 1412 - DNA, 358 bp, Homo sapiens
  misc_feature (1)...(358): n = A,T,C or G
aaccgtgcctcatgctgccctgaaccttctccccacacagnctccatctcaccatgtgggtnagaagacttttccagccttccactctgcactgggcatggaggaccactggccctgaaccatcccctgggcaggcatcagggaggcctncgctggacacattctggaggccgaagctacagagcagtcatttttgacacgggcggagttctcgtgccttctccagggacagtggcctgtgggccaggcaagctcagcaacagcccaacaaagtggaaagctcactgagtccatggctgagctggcctgggattttgccaccaaagaaagagtataataaactagccctgacaaagaa

SEQ ID NO: 1413 - DNA, 210 bp, Homo sapiens
  misc_feature (1)...(210): n = A,T,C or G
caaggtagggcagctcgnggcagcantggcccttgaaccagnaacagtggatgcaggtatttaagnaccatcaagatccaagccagattgactgggctgntttggcccaggcttggantgcacaaagagaagcctcaggacagcaaagcatcgtanaacaaccttnaggaatgatgccaaacggacaggatatgtttgcaacggagtctg

SEQ ID NO: 1414 - DNA, 311 bp, Homo sapiens
  misc_feature (1)...(311): n = A,T,C or G
ggagtctgcagaacgacccaaagaacagccccgtggtgctttggcttaacgggggtcccggctgcagctcgctcgatgggctgcttacagagcacggnccctttctgatccagccagatggtgtcaccctggagtacaacccctatgcttggaacctgattgccaacgtgctgtatatcgagtccccagctggggtgggcttctcctactcggatgacaagatgnacgtgaccaatgacacanaggtgggcgganaacaattatgaagnccttaaagacttnttccgcctttttccggaatacaaggacaa

SEQ ID NO: 1415 - DNA, 170 bp, Homo sapiens
  misc_feature (1)...(170): n = A,T,C or G
aggttatgggccagggattcgagttgatgaggtgtcattccatagttctgtcaatctagatgagtttgagtctcatcggatcctccgcctgcagccacctcagggcgagctgactgtgatgagataccagctctntgatgacctcccctnaccactccccttagaattct

SEQ ID NO: 1416 - DNA, 453 bp, Homo sapiens
  misc_feature (1)...(453): n = A,T,C or G
tgagaccttaagaagattcaagtaaatggaaaagggtgatgaatctagcacagatctggaggacctgaaaaatgcagactgggcccggttctgggtacaagtgatgagggatttgcgaaatggggtaaaacttaagaaagtccagcagcggcagtacaaccctctgcccattgagtaccaactgaccccttatgagatgctcatggacgacattcggtgcaaaagatacaccttgagaaaagtaatggtaaatggtgacgtcccccctcggttgaaaaagagtgctcatgaggtcatccttgactttatcagatcaagaccccctttaaatccagtttcagccagaaaactgaaaccaaccccaccacggccacggagcctccatgaaagaatattagaagaaattaaagcaaaaaagaangcttncggcctgtgtcaccaagaagaaattag

SEQ ID NO: 1417 - DNA, 361 bp, Homo sapiens
  misc_feature (1)...(361): n = A,T,C or G
ggctacacagctttctggtatgactgtatatcatctggactgcgaggaggcattctgatagagctggccatgcggggtcgaatctatctggaacctcccaccatgcgtaagaagcgactcctagacagaaaggtcctgctgaagtcagacagcccaacaggtgatgttttgctggatgagacgctcaaacacattaaagcaactgagccaactgaaactgtgcagacgtggatcgagctactcactggtnagacatggaaccctttcaaattacagtaccagctgagaaatgtacganaacgaattgccaagaaccttgnnggaaaagggccttnttaacccaccagagaagccagaattt

SEQ ID NO: 1418 - DNA, 186 bp, Homo sapiens
tgagcttgtcagaactgtagcccggcatcatgaggaaaagaaacttcgtgaggaaagagggaagaaggaagaacagagcagactgaggcgcattgctgccactactgccagagaaatagaatatttttggtcaaatattgaacaggttgtggaaataaaattacaagtagaattagaaaaaaaaaa

SEQ ID NO: 1419 - DNA, 358 bp, Homo sapiens
gactgagttccaatctttgaagaaagttgatgactctgtgacgttgaatgtgccagctgtggacctagaccacaagtttcgatgcaaggttctggactgtttgaaatttttccgcaaggctaaattgctgcactatcatatgaagtatttccatgggatggagaagtcaccagagccagaggagggcccagggaagacgcatgtacagactcggggctctgcggtgcctgacaagacaagccaggagagcctaaccaggaagcgggtctctgccagttcccccactgcaaaagagaaggaaaagactaaagagaagaaattcaaagaacttgtgagagtgaagccaaagaagaaaaaa

SEQ ID NO: 1420 - DNA, 330 bp, Homo sapiens
  misc_feature (1)...(330): n = A,T,C or G
gcttgaattatttaaaacggcacatgaaattatggtngatgaanaaagacagancttcctcagcaccaaaatagcaacattggatatgccaagtgaccagatagctgccaatcttcaagcagttataaatgaggtctgtaagcacagaccactgaatctgggtccgcttgtggtccgtgccttccttcgtagttcaaccagtgaaggtttactactgaagactgactcattgctacccaaagaagctaaaactacagaagctgaaacggaagaaactcaaacggcagaagctgcctagaagtgttatattgtgaaattattgggggatgt

SEQ ID NO: 1421 - DNA, 536 bp, Homo sapiens
acgcttatgataatctcaacaaagttcgagttgctatcaagaaaatcagtccttttgagcaccagacctactgtcaaagaaccctaagagagataaaaatcttactgcgcttcagacatgagaacatcattggcatcaatgacatcatccgggcaccaaccattgagcaaatgaaagatgtatatatagtacaggacctcatggagacggacctttacaagctcttgaagacacagcacctcagcaatgaccacatctgctattttctttatcagatcctgagagggctaaagtatatccattcagctaacgttctgcaccgtgacctcaagccttccaacctcctgctgaacaccacttgtgatctcaagatctgtgactttggccttgcccgtgttgcagatccagatcatgatcacacagggttcttgacagagtacgtagccacacgttggtacagagctccagaaattatgttgaattccaagggttataccaagtccattgatatttggtctgtgggctgcatcctggca

SEQ ID NO: 1422 - DNA, 244 bp, Homo sapiens
  misc_feature (1)...(244): n = A,T,C or G
cttcccccccccattacgcnnattggctcgtnttccgcagtgtttttccagcatgggcagctatccaaagaaacctatgagntcataccttcgattttncacagaacagttanccaaatttaaagttaaacanccagatgcaaaactttcagaattggttaggaaaattgcagccctgtggagggagctaccagaagcagaaaaaaaggnttatgaanctgattttaaagctgagtggaaagca

SEQ ID NO: 1423 - DNA, 313 bp, Homo sapiens
  misc_feature (1)...(313): n = A,T,C or G
gactgaggccctgtctttggaagcggaagcagcaggatgagaggctcaaagccatcttagccacatgccatcttcatgactccgacacacagggcatgcntctttcccctctgccatgaccgccactgatggtatctacttgcagcagtgtagagcttcgcttccaggagacgttaaacccgggcacatgatatttgcaccacctgagcacaaatttgatggctcctttgtcgacctgctggtgnggcaggataaacgggnatttgtgaagtagncttagcgntggataaaanggtccttttctctgcctgaa

SEQ ID NO: 1424 - DNA, 447 bp, Homo sapiens; identical to SEQ ID NO: 52
  misc_feature (1)...(447): n = A,T,C or G

SEQ ID NO: 1425 - DNA, 171 bp, Homo sapiens
aggcatgcacctgctcatcacaggccccaatggctgtggcaagagttctctgttccgaatcctaggtggactctggcccacatacagtggtgtactctataagcccccaccccagcgcatgttctatatccctcagtcctctcagtaaaaacctctggaaagtaaaaaaaa

SEQ ID NO: 1426 - DNA, 181 bp, Homo sapiens
tgggcctcacagaggctgtgaaggtgccatatcctgtgttcgaatccaacccggagtttctgtatgtggaagggctccccgaagggatccccttccgaagccctacctggtttgggattccacgcctcgagaggattgtccgtggcagcaataagatcaagtttgttgttaaaaaaaaaaa

SEQ ID NO: 1427 - DNA, 355 bp, Homo sapiens
  misc_feature (1)...(355): n = A,T,C or G
tcgcctttgtgaatggactttctgggcagattttattcgagcgctggtgcatcggcttgcacaatgtgatcttcacggcattgccgcccttcactctggggatcttcgagaggtcttgtactcaggagagcatgctcaggttcccacagctttacagaatcactcagaacgctgaaggtttcaacactaaggttttntggggncactgcatcaatgccttggttcattccctnatcctcttctgggttcccatgaaagcgctggancatgattttcctngatgacatntatgagggaagaaanggngaaaaggaaanatatttcccanaanagaaagtctcttttaaaatatttg

SEQ ID NO: 1428 - DNA, 309 bp, Homo sapiens
  misc_feature (1)...(309): n = A,T,C or G
gagccagcttttttgatgggaagactccctttacactgcatcacagaccgcatgcactggcagctggcttctgaaaacctcagctggaggacagcgggcagccactgtgtggtcagaggcattgcaggaggaaaagaaattagaggagactccaccatgctatagtcccggcccagcatgccanactttgtctatcagcctgcacgttgttgcctcctgggnaagtgatgctgtgagcccctagcgagtccttnttgggtggctggggagacctcttggagtgataaatgttaaagacgaaaaaaaaaa

SEQ ID NO: 1429 - DNA, 354 bp, Homo sapiens
cttcgccgtccgctggtccgttcatgacccgccagggagaaacgccccggagtagagtcccgctacccaagtccgcccggcctctcacacctccacttccggagactttgcaacgccgtatgaaacggactacaactcccagcgtcctccgcgcgcggggagctgtaatcacaccgcccgccctcctgggggaagacccgaaaggaacgctgcttccagtggcttcgcggtgagctgaggtcacagaggagctggacactgggggggcacaattattgattgtaaactgtttataaagatttggaaccaaaagaatataaccagaaattcagtatgttagcgagaaaaaaaaaa

SEQ ID NO: 1430 - DNA, 512 bp, Homo sapiens
gactgaggtaacaaaccgaaagtatccaaagctaaaagaagtggacgacgtgcttggtggagcagctgcatgggagaatgtggactctactgcagagccatgtccaaaatgcgaacatccccgtgcctacttcatgcagcttcagacgcgttctgcagacgagccaatgaccaccttctataagtgcttgcaatgctcagtgtggacatcgctggagggattaagggcaggacttgcccagctgcaagcatgaattttgtgtgtactgaaggtctttgctatatgatagtaagctgacttttctgtggtgaaggatcagggtgaaatataactcatctgcaagttaacagataaagtccttgatgtataggggccgtcaggtccttgggagatacacataaggatgctcacttgggttcaggccctgttccttaccattcaaactaggaacttggtttatagtcagtaaaaataaaaattattattattatttagtttttcaaaaaaaaaaa

SEQ ID NO: 1431 - DNA, 353 bp, Homo sapiens
  misc_feature (1)...(353): n = A,T,C or G
gcagggacatgcagaacatcctgtatcatgggctcatccatgaccaggtgtgttgcccgccaggctgattactggcagtttgtgaaagacattcggtggctcagcccgcactcagcccttcacgtggagaagttcatcagtttgcatgagagcgaccagagcgacactgacagcgtgagtgagcgtgctgttgcagagctgtggcttgcagcatagcctgcagtgccactgcctctcagcccagctncggcctctgctcggggacagacagtacatcagaaaaattctacacagaaacttgccttcctgctgagtgacgccccacgtcacangccatgctccagtgcctggaa

SEQ ID NO: 1432 - DNA, 544 bp, Homo sapiens
  misc_feature (1)...(544): n = A,T,C or G
agtggtaagaagttcagaagtaaacctcagctggcaagatacctgggaaatgctgttgaccttagcagttttgacttcaggaccggcaagatgatgcctagtaaattacagaagaacaagcagagactccggnatgaccccctcaatcagaacaagggtaaaccagacctgaacacaacattgccaattagacaaactgcatcaattttcaagcaaccagtaaccaaattcacgaaccacccgagcaataaggtgaagtcagacccccagcggatgaatgaacaaccacgtcagcttttctgggagaagaggctacaaggacttagcgcatcagatgtaacagaacaaattataaaaaccatggagctacctaaaggtcttcaaggagtcggtccaggtagcaatgacgagacccttctgtctgctgtggccagtgctttacacacaagctctgcgcccatcacaggacaagtctctgctgccgtggaaaagaaccctgctgtttggcttaacacatctcaacccctctgcaaagctttcattg

SEQ ID NO: 1433 - DNA, 122 bp, Homo sapiens
  misc_feature (1)...(122): n = A,T,C or G
gactgaggccgctctgtctgatggacagcntgctggggaacncanaactcatcgtagacctgacccagtgtgtggactgngtcattcctccagaggggtctgccatgcaggtattggggcag

SEQ ID NO: 1434 - DNA, 549 bp, Homo sapiens
gttagggagatcgactatttcatgtctactatgaaggactttttgatgacgaactgcagccgagttctaatgtatgaaggattaccaggatatggaaaaagccaggtactcatggaaatcgaatatctggcctctcagcatgagaaccacagggctgttgctattgcactgactaagatcagcttccatcaaaatttttatactatccagatactcatggctaatgtactaggtctggacacttgtaaacattacaaagaacgacagaccaatcttcaaaatagagtcaagacgctgttggatgagaagttccactgtcttcttaatgacatcttccatgttcagttccctgtttcccgggagatgtccaggatgagcaagataagaaagcagaagcaactggaagccctgtttatgaagatcttggcgcaaacagtgagagaagaaaggattattttcatcatcgatgaggcccagtttgtggatggaacctcctgggccttcatagagaagctcatccgctctatgcccatcttcatcgaagggggg

SEQ ID NO: 1435 - DNA, 172 bp, Homo sapiens
  misc_feature (1)...(172): n = A,T,C or G
actgagatatcatcgagagatacgagttntctctggtaatgttttttgctactgncgagatcaacaagaatccttatcttttacccaacacgtctttgctattctccttcatggatggcctgtgtgaagataaatngggactctgggtaaaatatatttagaagaaaaaaaa

SEQ ID NO: 1436 - DNA, 509 bp, Homo sapiens
  misc_feature (1)...(509): n = A,T,C or G
ctctccgtccttcaccccccttctcaaaacctctgttttgggctgggctgagggagttgctgaaacccaggggcaaagagcctgatgaaactgtgcacagttttgcccagcgccgccttggacctgaggtggcagtctttagccatggacagnctttgccgaggggtgtttgctggcaacagccgtgagctcancatccggtcctgctttcccagtctcttccaagctgaacaaacccaccggtccatattgctggggctgctgctgggctgcaggacagagtccccagccggattcctcactaattcgncaggcccgggctgagcgatggagccagtggtcactccgtggagggctggaggtgttgccccaggctcttcacaatcacctagcaagtaaaggggtcactgtcctcagtgggcagccagtctgtgggctcagccttcagccagaagggcgctggaaggtgtctctaggggacagcagtctggaggctgaccacattataa

SEQ ID NO: 1437 - DNA, 382 bp, Homo sapiens
ccccaccctggactaacagagaattgacataatctcgaattgcctgagcaagtggtggagaaatgacctgcgacctctccgactcctgcagtacttctctttcactagagaaaactgactgatctgacaccgccaggcatcctcagcacgcaatggctgagctctacctcttccctccacggcaaatattttccactatgtccttagaaggaagagactgttggaagaggagtagaggatctcgattcagttccctgctccctcagcttcaacagcttcttctcatatagcttcctggttgttcctgggttaagggagaagttccattatattggcatgaaattatctttttaaaagattaaaaacaacaaacaataaaaaa

SEQ ID NO: 1438 - DNA, 507 bp, Homo sapiens
  misc_feature (1)...(507): n = A,T,C or G
gactgaggaaaaagtggccagtgtgtatgaatctccaggctttttcctaaacttggagcccatccctggggccttggacgctttgcgagagatgaacgacatgaaagacaccgaggtcttcatctgcaccaccccacctgctgaagtacgaccactgtgtgggcagagaagnacctgctgggtggagcagaacctggggccagagtttgcggagccggattatcctgactagggacaagacggtggtcatgggagacctgctcattgatgacaaagacaacattcaaggcctanaggagaccccaagctgggagcacatcttgttcacctgctgccacaatcagcacctggccctgccccccaccaggagacggctgctttcctggagtgacaactggagggggatcattgagagcaagcgagccagcctgtgaaggaccctgaggtggacaggaccctgcctggacaggtgactttctttaatcagggagccacttgaacagactg

SEQ ID NO: 1439 - DNA, 518 bp, Homo sapiens
  misc_feature (1)...(518): n = A,T,C or G
gacaggcctggccctggtacnnaatgaagctggacagtccacattccttcctggacgcanaggaggtggaggaggcagangaccagcanntgctgnagccataggcttgnaggacntacatggagcgccgnancgngctgcgtgagttcctgaccncagacctgaccccncanttgctcaagcgccaccatgcccgcatgcagantgctcaagaagtgctcctactacattgagattctccctaancacctggccctgggtgaccagaacccgctggtgctacctaacaccatgttccagctcattgatccctggaagttccagcgcatgaagaaggtgggcacagcacagaccaagatccagctcctcctgcttggggacctgctggagcagctggaccatggccgggcagcactggatgccctacttgaggcccctgacccacggcccttcctggcaggctgggggcttgtggaacagcagttggcagacctatcagttgtcatggacaacttccc

SEQ ID NO: 1440 - DNA, 187 bp, Homo sapiens
  misc_feature (1)...(187): n = A,T,C or G
tgaaccctaacaccctaggatatgctatgaggattacaagatacttaaagacagatttaagaaactttgnccagaactgctgaacatacttaaggccaaaaggcagcccaagaaagtctcttttactacacaaacctgcttgaagtgtttacattcctgccattattattataacctggaggctaca

SEQ ID NO: 1441 - DNA, 252 bp, Homo sapiens
agaagaagcagcaggtatgtggttcggtttctggaagccaacaagatagagttcgaggaagtggacatcaccatgtcggaagaacagaggcagtggatgtacaaaaacattccccctgagaagaagcctgcgcagggcaaccctctgccacctcagatatttaatggggatcgatactgtggagactatgacagtttttttgaatcgaaggaaagcaacacagtcttttcattcttaggcctgaagccacgg

SEQ ID NO: 1442 - DNA, 354 bp, Homo sapiens
  misc_feature (1)...(354): n = A,T,C or G
gactgagggcaacggcgtcacanggnggcccgntccacagngnccatnacacnnctnnncagggngcngntgggctcctgagatctgactggtncccttgttccggccttgctgatctcatgggctgtgcctgtgcccagccacctgcccacaatccttaccagctcatccattccagagaaggtgtggttcgcgttgtccagggagtagatcagctgatgcatcccatcgttggtctcgctgtttccatagaaaccaacgcccaccgcagcactacgggcaaaaccccaaagaaaggttaggggtgatacccagaagagaatacacttgctgctttgtgtgtaaaaaaaaaaa

SEQ ID NO: 1443 - DNA, 456 bp, Homo sapiens
  misc_feature (1)...(456): n = A,T,C or G
tcagcgcggatagcggnggcccttagccatgggcaggacagcggcnnanntcctaggcttcntgntnagcttgctgggcatggtgngaacgctnatcaccaccattctgccacactggctggnngaangnccatgngnncaccaacatnctgnctgtcgngnnctacctgaagggactgngnatggaatgtgtgtggcacannacnngcttntaccagtgtcagatctaccgctcactgctggcgctgccccgggatctgcaggccgcccgggcgctcatggtcatctcctgcctgttgtcgggcatggcctgcgcctgcgcagtagtgggcatgaagtgcacacgctgcgccaaaggcacacccgccaagaccacctttgcagtgctggggggcgcactcttcctgctggccggcctgctgtgcatggtggccgtgtcctggaccacgaatgacg

SEQ ID NO: 1444 - DNA, 360 bp, Homo sapiens
  misc_feature (1)...(360): n = A,T,C or G
tgtccttatcagactganggggttccaggcctnagncaccccagngatcngagagttcagagatgcattgaaagattggagcaaaactcacaaccacggacctacaaacaataacatttgcttgaagagaagggtgtgaactgccagctactttctttggtcttccccagtgaccacctaagtggctctaagtgtttatttttataggtatataaacatttttttttctgttccactttaaagtggcatatctggctttgtcacagaggggaaacttgtctgtgccaaccccagtcatctgaaaactcagatgcctggaaggtctgaagctgacctcaatgactacacataatatttgat

SEQ ID NO: 1445 - DNA, 308 bp, Homo sapiens
  misc_feature (1)...(308): n = A,T,C or G
gactgagatgtgctacgctntgcantcttctttctgtggccatgattcatagcattcggagtactacaaagaagctgtacctaaaagacagacatgtctacagaangcatncancagctacagccacacggctgtgtggaaccctttgccatccacctgagagacaaaccaaagtcnggaaggaaaatctaggcttggtggcacatggcgttccgtctcagtgttcnacggntgcaccagcccaggtggtntaggtgntgtntacntgacttcagagacttcaccgagnnaggtggggctatgataga

SEQ ID NO: 1446 - DNA, 395 bp, Homo sapiens
  misc_feature (1)...(395): n = A,T,C or G
tgtggaggagtctggaggcgagcagcagtgttagcatttcccactctgcctcagccacggggaacgtgtgcattgaagagatagatgttgatgggaagtttattcgcttgaagaacacttctgagcaggatcaaccaatgggaggctgggagatgatcagaaaaattggagacacatcagtcagttacaaatatacctcaagatatgtgcctgaaggctggccagactgtcacagtgtgggctgcaaatgctggcgtcacagccagccctccaactgacctcatctggaagaaccagaactcttggggtactggtgaagatgtgaaggttatattgaagaattctcagggagaggaggntgctcagagaagcacagtcttcaagaccaccatacc

SEQ ID NO: 1447 - DNA, 123 bp, Homo sapiens
  misc_feature (1)...(123): n = A,T,C or G
tttggaggcacctgcgtgtggtaccatgtgttccgtggtggnaagatcttttggctgatccctccaaccctgcacanctnggctttgtacgaggagtgggtgctgtctggcaaaacagagccg

SEQ ID NO: 1448 - DNA, 468 bp, Homo sapiens
  misc_feature (1)...(468): n = A,T,C or G
atcagctgacactccttctgccccatcaccccctccaacgccagcacccgttccggtcccccttccaccttctgtaccagcacccgtttctgtgcccaaggttccagcagatgtcacccgccagaacagcagctccagtgacagtgggggcagcattgtgcgggacagccagagatacaaacaactcccagtggaccgaaggaagtcccagatggaagaggttcaggatgagctcttccagaggctgaccatcgggcgcagtgncgcgcagaggaagttncacgtgccacggcagaacgttccagtgatcaatatcacttatgactcctcaccggaagaagtaaagacttggctgcagtcaaagggattcaatcccgtgactgtcaatagnctcggngtgtttnaacggagcacaantcttttctctcaacanagacgaactgaggtctgtctgcccggaaggcgccc

SEQ ID NO: 1449 - DNA, 382 bp, Homo sapiens
  misc_feature (1)...(382): n = A,T,C or G
cattaaagacaacaggagagagaaggcagtacttctgggagtccagaccaaccaagaggaatgcantgntcaccacttactttctgaccctgatatgacagtggtgcatgagcacacaggcatggngaacagattcgcccgggaccaanttaaggacctggntctgcagccacctctccaagaaataattcctcantctgaagaagtcccaaactgntantccagctttatcgaggcttcctcttgccctcacccanaacccanttgtgaacaagtngcctcagcagaactttgccttcggagagantcnataggtccttntcgntcaacagcanccccccagaaggctntgnnaatcttggtcagagcaaattcgatgctc

SEQ ID NO: 1450 - DNA, 520 bp, Homo sapiens
  misc_feature (1)...(520): n = A,T,C or G
gtcccgagcagacagagtgcagtcgtgtgggcagacaggncttcatnatcaccctgggctgcnccttcccnatcttnatatgaacncnntgnatcacctttgcntananaananggagtggttgctntgtacgatggaagaggnanagantgacctgananncaaaccccanaattgctgtgcttacatcttgcctcttaggctcagacaagggggctagcttgataaggtgtggaagaggcctctatcaggatgaagactaccaccctctctcagaccaacagtagagcagatgagccaggacttgttccctcattgccacagatgaccatccctcacttgggatgggcactgcggaattacagctaccattccccatttgttccctgagaggcctgcacatggctctgctaggagctttcagggaggaccagtgcctatgctataggcccttttcaaggnggagccagatggaacatgcctgactggccccctgacctattgggcacactccttctgg

SEQ ID NO: 1451 - DNA, 547 bp, Homo sapiens
  misc_feature (1)...(547): n = A,T,C or G
actgagtatatgactctcaatccctctncaagaggaggaatactggatctccagacaggaagccctcaaagaaacctaagagagacagttcttctctgagttccccgctaaaccctaagctgtggtgtcatgtgcacttggagaagtcgttaaatggcccaccactcaaagtaaagaactcaaagaattccaagtctccggaagaacatttggaaggggtgatgaaaattatgtcccccaacaacaacaagctacacagcttccacattcctaagaaaggcccagccgccaagaagccagggaagcacagtgacaaacctctgaaggccaagggcagaggcaaaggcatcctgaatggacagaagtccacaggcaactccaaatcacccagcaagtgtgtgaagactcctaagaccaaaatgaagcagatgactttgttggatatggcactgctgcctccctgcttcctaccctagatgttggtgttgtagcagaaagctggtgttcccactgcagtgacatctgtctgcatggtggatttttaagc

SEQ ID NO: 1452 - DNA, 552 bp, Homo sapiens
  misc_feature (1)...(552): n = A,T,C or G
tgagaagctagtgcacatcctgagtccccaggncaaggtgtcactgaccttcacgacctctgaacgggtagtgctgacctgtgagctctcaagggtggattttcctgcaacctggtacaaggatgggcagaaggtggaggagagcgagtcgctcatantgaanacnganggccgnaaacaccagacctgatcctgcctgangctcangtccgagacagcggtgaatttgagtgcagaacggaaggggtctcggccttctttggagtcactgttcaagatcccccagtgcacatcgtgaacccccaagagcatgtgtttgtccatgccatcacctctgagtgtgtcaggctgacctgtgaggtagaccgagaggacacaactgtacactggtncaaggatgggcaggaggtggaggagagtgacatcatcgtattagaaaatgaagggccccatcaccgcctggtgctacctgcagcccggccctccgacgggggcgagttccagtgtgtcgcaggagatgaacgtgcctacttcacagttaccatcacaggg

SEQ ID NO: 1453 - DNA, 216 bp, Homo sapiens
  misc_feature (1)...(216): n = A,T,C or G
gcctccccgccgctggtggaaccacatgcatttccagcaccatgccaagcctaactgcttccgcaaggaccccgatatcaacatgcaccccctcttcttcgccctggggaaggnccttcctgtggaggtangctgggtgtgagtgcagagggnaatggagtggcctgttctgcaagctgaagggaaagcgcnngntngctgttatcagagatggca

SEQ ID NO: 1454 - DNA, 157 bp, Homo sapiens
  misc_feature (1)...(157): n = A,T,C or G
atgggctgccgatcaaaactatatggnnccttnaggacattactgtcaaggaccngggaaaatgacctcgttgccattggatagccagtgaganagntacctactctcgtccatatacagtaccaacacaaaattcggggacgtaccagttcagcat

SEQ ID NO: 1455 - DNA, 514 bp, Homo sapiens
  misc_feature (1)...(514): n = A,T,C or G
actgaggctgtggcagatgagtctggtctaaattttatatctgtcaaaggccctgaattattgaatatgtatgttggtgagagtgaacgtgctgttcgacaagtttttcagcgagccaagaactcagccccctgcgtgatattttttgatgaagnggatgctttatgtcctcggagatcagaccgagaaacaggtgctagtgttcgngtggtgaatcagctgcttacagagatggatggnttagaaacacgccancaagtttttattttggctgncaccaatagaccagatatcattgaccctgccattctgcgcccaggccgnctggacaaaacgctctttgtgggtttgcctcccccagnagaccgtgttgccatattaaagactattacaaaannnggcaccaaacctccactggatgaagatgtanatttgnaaacaattgctaatgaccttcgtggnacttgntatacggntgcggacctcactgctctggnacgggaagcttctctct

SEQ ID NO: 1456 - DNA, 311 bp, Homo sapiens
  misc_feature (1)...(311): n = A,T,C or G
ggtaactgccatgtcacttcataacctgaacaanaggattgtggaatctggagaagacgagttgacatccaggctggatcactataaggccaaggccacaaggcacatcttcctcatccggcattcccagtaccatgtggatggctccctggagaaggaccgnaccctgacaccattaggtcgggancaggcatgaactcacggggcnttcgacttgcaagcctgggattaaagnttaataaaattgtccattcctctatgacccgtgcagtagagaccacanacatcatcannacgcacctgccaggtgt

SEQ ID NO: 1457 - DNA, 504 bp, Homo sapiens
gactgaggcccagtaaaagagtagccaccaaagcaagcagaaaagcaaaagaaagaagagatgaaggctctgcagggccagtcaggagaactgagagagacccaggctggagtccaggagaaggagagtgaggctgtgaagctcaggaatcaagaccctcaaggaaggaaagctgtcctacccgacactccagaaatcccagcctaaccactttttggataatctgtgtatcttttgtggggagaggaatgagtccttcacagaagagggcctggacctccactactggaaacactgcctcatgctgaccagatgcgaccactgcaggcaggtggttgagatatccagccttacagaacacctgctgacagaatgtgacagaagggacggattcgggaagtgcccccgctgcagcgaggccatccccaaggaggaacttcctgggcacatcaaaactaaggagtgcagccctgccaagccagagaaggtggcgaaccactgtct

SEQ ID NO: 1458 - DNA, 212 bp, Homo sapiens
  misc_feature (1)...(212): n = A,T,C or G
gctaccaaattactgcaatggcaaatcggacaattttagtggacaataacacatggaataatacccatatttctcgagtagggcaggcaatggcatccacagaagaaaaagcctatgaaatcatgagggagcttgatgtcagctatgtgcttgncatttttggaggccttactgggnattcttcggatgatatcancaagtttctttggatg

SEQ ID NO: 1459 - DNA, 320 bp, Homo sapiens
  misc_feature (1)...(320): n = A,T,C or G
gcgctaggatgcttttcggccctgcctggccacacactgggctgagnatgaagactgcanaagggaggcggagaactacacaggcggncgacctacagggtcccctgaggcagatgtgggccactttaagctttttctcttggtcagtatgtactcccgtgcgagcacatnanagttcttagtgggaattgntttctcagncacattgttagctgccctgcctcactttnaaaagactaagccaccttggccaanacctggccttcctctgtggacccttggttctgaccccagaacctctcttccccaccaaatccaaa

SEQ ID NO: 1460 - DNA, 264 bp, Homo sapiens
  misc_feature (1)...(264): n = A,T,C or G
ccccccccttttgtggtaacctggcgcggaaagcaagcagtgcgnncgagttcgggagatgtgtgatgtgtgtgagacaaccctcttcaatatccactgggtctgtcggaaatgtggatttggggtctgccttgactgttaccggctcaggaaaagccgtccaaggagtgattttgcagcaggcaacttgggactatgacctgagaaatgagaagaaacaagctagttccttttttttttnacaaannagggggtcctttaaaa

SEQ ID NO: 1461 - DNA, 448 bp, Homo sapiens
  misc_feature (1)...(448): n = A,T,C or G
gatgagagtagctcanatncanaagcaaatgagtacatcagcntcccaactttcctcnaacanangcagaaccccgacacgctctcagngatgtcggaatcctagagccatgcaggccgcgtgcatgcagatccagcngggccttgcagacagcgtggccacagaagctcctggcctnatcccnngnnttactnntggcttggcagcaggcaattntggaggctcttncggaaccaatgcacctagcactgcacctagtgaagatacagaacccccaagggggcactgctgagccaggccaccagcagnntatccagcanatgctgnaggcccttgcggnggtgaatcctcagntgcagagtccanaagnnagatttcagcatcaactggaacaactnagtgccatggnnatncttgaaccgtgaagcaaacctgcaagctctgatag

SEQ ID NO: 1462 - DNA, 148 bp, Homo sapiens
  misc_feature (1)...(148): n = A,T,C or G
gctacttcacatttgactgactccaagaanggcaatccagntgcgttcgctcttccccttggcgttgcccggaatgctggccctccttggctggtggtggtttttctctcgtaaaaaagatcggctcagcagcagtgaaaaaaaaaaa

SEQ ID NO: 1463 - DNA, 467 bp, Homo sapiens
  misc_feature (1)...(467): n = A,T,C or G
agaataggggagagagctcatttgatattaacaacattgtcatcccaatgtctgttgctgcaacaactcgtgttgagaaactacaatacaaagaaatccttactccaagctggccgagaggttgatgttcagtctctgaaggggagtcctgatgaagagaatgaggagatcgaggacctatctgatgcagcctttgcggccctgcatgccaaatgtgaggagatggaaagggcanggtggctgtggaccacaagngngccaccccagcgtcggggcancagntnttacaggtcatcagacggccggaccacccctcagttgggcagtgtnaacccctccaccccacagcctgcgtcccctgatgtcagtagtanccactctctgtcanaattcnnccatggttccatctcctaggantcccattancccagaattncactcagcccttctcacccctgttggccttg

SEQ ID NO: 1464 - DNA, 234 bp, Homo sapiens
  misc_feature (1)...(234): n = A,T,C or G
tccggccatccagagantagaagaccaaattgtcaagnctnctgaggacngnncgggcaataccngtggacnagagctggccaatggcatnaaagtgcttatcatcagggaacccaccacangcaagnnctcagcggccctcgangggcacataggntcantgtcagnacnctgcaaatatctntgncnttaagccatntttgtgaacntatgcntgattttgggaaccaagaa

SEQ ID NO: 1465 - DNA, 481 bp, Homo sapiens; identical to SEQ ID NO: 53
  misc_feature (1)...(481): n = A,T,C or G

SEQ ID NO: 1466 - DNA, 409 bp, Homo sapiens
  misc_feature (1)...(409): n = A,T,C or G
cccaaccctcagctcagcagccccatcctttctccagtgcagtcgccagcaccagctcagctgtccactctgaagaccatccgtccctcaggaccaccgctttccatcatgtcccagtttgctagaccttttgttcctggacagggagatgccaggtatccagctgcttggccagcccctgcagtacaaccctcctactcttctgcatggacacattccacatcaacagggtcagtctggcancaggcatggaaaccgaggacgtanacaagctaagaaagctgcatccacagaccttggagcaggagaagcagntgtcggnaaggtcttggaaaacacagnnctaccagacggaataacttgagtggaagccgagaagctttctggggaactctttaaaattggcgcc

SEQ ID NO: 1467 - DNA, 451 bp, Homo sapiens
  misc_feature (1)...(451): n = A,T,C or G
tggacctgcagctggagtggatgaaattagaagattttcagaagcatctggatggggaagatgagccctttatcacaacaaacaggattccaaataatttgttgagggatgctgtgaaaaatggagattatattgctgtgaaggttgcactgaactcaaatgaagaatacaacttggatcaagaggattctactgggatgaccctggtgatgttggctgcagcaggcggtcaggacgacctcctcagactccttatcaccaaaggtgcaaaagtgaatgggcgccagaaaaacgggactacagccctcattcatgccgctgagaagaactttttaacaactgtagctattcttttggaagctggagcttttgtgaatgttcagcaaagcaatggtgagactgcgctcatgaaagcttgcnaaagaggaaantcngacattgtccgccttgt

SEQ ID NO: 1468 - DNA, 512 bp, Homo sapiens
  misc_feature (1)...(512): n = A,T,C or G
ttgcagaccacattctgaagagctgaaccattntccagaggagaagagaagcgaggtggtcattctgttttctgcccactccctgccgatgtctgttgtcaacagaggggacccctatccccaagaggtangagccantgtccacaaagtcatggaaaagctgggttaccccaacccctaccgactggtttggcagtccaaggttggtccagaaccctggttggnccctcagacngatgaggctatcaaagggctttgtgagcgggggaggaagaacatcctcttggttccaatagcatttaccagtgaccacattgagacgctntacgaactggatattgaatactctcaagtgttggctcagaagtgnggagctganaacatcagaagagcggagtctcttaatggaaatccattgttctccaangccctggctgatctggtgcactcccacatccagtccaacaagctgtgctccacgcagttgagtctgaactgtccgctcagcattg

SEQ ID NO: 1469 - DNA, 326 bp, Homo sapiens
  misc_feature (1)...(326): n = A,T,C or G
gcgccgggttccgaggttctccttggaccgccacaagcctgggaagtttgaagatttctaccagctggtggtgcacacccaccacatctctaacaccgaggtgaccatcggctatgctgatgtgcacggggacctgctgcccatcaacaatgacgacaacttctgcaaggcagtctcaagtgcaaaccccttgcttcgagtcttcatccagaaacgaggaaggncaaanngncgggntctncgcnaatngtgacntgaccgtggantanatacacacccttgtgancctgnctccccctggccccctgttgttggtttccaacgga

SEQ ID NO: 1470 - DNA, 477 bp, Homo sapiens
  misc_feature (1)...(477): n = A,T,C or G
tccgactccaacgggcacagccacctgctgccatccaaccatagtgtcatcgagacttttatctccacccagatggcctcctcttcccagtaaccgnggtgactgcctcccaggagctgggtccccagggcctgcacctgcctgcatagggggtgaggagggccgcagccacactgcctgcgggatatctgagcctgccatgccacctgacacaggctgctggccttcccagaagtctacgcattcattgacactgctgctcctccatcatcaggaagggatggctctgaggtgtctcagcctgacaagcgagcctcgaggagctggaggacggcccaatctgggcagtattgtggaccaccatccctgctgtttanaataggaaatttaatgcttgggacaggagtgggggaagcctcgnggtgcccgcaccccccccagtcangagcctggaaggccttacaaggatctgtgcct

SEQ ID NO: 1471 - DNA, 481 bp, Homo sapiens
gtgatgaaggagagaaagaagtgatgaagctgtggaacctccatgtcatgaagcatggatttattgctgacaatcaaatgaatcatgcctgtatgctgtttgtagaaaattatggacagaaaataattaagaagaatttatgtcgaaacttcatgcttcatctagtcagcatgcatgactttaatcttattagcataatgtcaatagataaagctgttaccaagctccgagaaatgcagcaaaaactagaaaaaggagaatctgcgaccccttcaaatgaagaaatagctgaggaacaaaatggaacagcaaatggattcagtgaaactaactcaaaagagaaagctttggaaactgacggtgtctcaggggttccaaaacagagcaagaaacaaaaactctgagaacttgccccatgttttgaacagacactgaagttgcttctagggaattcagcctctaggaagagtttttggttttt

SEQ ID NO: 1472 - DNA, 502 bp, Homo sapiens
  misc_feature (1)...(502): n = A,T,C or G
gttgcatctaagttttaaaattagttgatatatcctatggtggtgaaaatggattcaacctgctattgaattatctactgaagttctctccaacgtgaagttcattcaagagaagaaattaataggacgatattttgatgaaattagccaggacacaggcaagtactgttttggagttgaagatacactaaaggctttggaaatgggagctgtagaaattctaatagtctatgaaaatctggatataatgagatacgttcttcattgccaaggcacagaagaggagaaaattctctatttaactccanaacaagagaaggataaatctcanttcacagacnaantagactggacaggaacacgaactgatagaaagcntgcctctcttggaatggtttgntaacaactataaaaaatntggagctacactagnaatntgncacagatnagcnacangagggatcactggtttgtnaaaggaatttngagggaatctggaagg

SEQ ID NO: 1473 - DNA, 352 bp, Homo sapiens
  misc_feature (1)...(352): n = A,T,C or G
tgtgcatgccctgggcacntggaaatgatctggctcggngcctangatggggaagaggttatgaaggngagaatttganaaagattctcanggatatagagctaagnanggnggcatatntggacctgatggntcctggaagtgantccccaacatattggagaaaagagtgatccagttccctctcaaatcatcaataactacttnnccattggcgtggatgcttctatngctcaccgattccatctcatgagagagaaanatcctgagaagntcannaccagaatgnncaacangctnntgggnacntttgantttgccacanctgagnccatctttctcaacatgcaaa

SEQ ID NO: 1474 - DNA, 413 bp, Homo sapiens
gaggttcgcagcaatgcctctgccagctcctccagcaatgagggtgacagtgaccgtgaagagaagaaacgggaacagctcaaaagggctaagatggccaaggatcgaaagagccgcaggaagtcttcagaggcaaagaagggtaaagatccaaacgccccaaagaggcctatgtctgcgtacatgctgtggcttaatgcaagccgcgagaagatcaagtcggatcatcctggcatcagtatcacagatctttccaagaaggcaggggagatctggaagggaatgtccaaagagaagaaggaggagtgggaccgcaaggctgaggatgctaggagggagtatgagaaagccatgaaagagtatgaaggaggaagaggggactcatctaaaagggacaagtctaagaaaaaaaa

SEQ ID NO: 1475 - DNA, 308 bp, Homo sapiens
  misc_feature (1)...(308): n = A,T,C or G
gttcctggaactacaacaactcaaggccaacagctggaaactnctggagccgaaggaggagangaaggtccctccgccgataccaaagaanccctngagggggcggggcntgccggtgaaggagngctccctggactcggtggaccggcagcggctangaatcngcgcaagcggnntnctggcngnccaagngcgccgncctcgttccgccacagtttngggnttcagagagcgngnacangcataagaaancatacatncccgnangacccaacaccaggncngtnaccccgccccgggcccgtcca

SEQ ID NO: 1476 - DNA, 291 bp, Homo sapiens
  misc_feature (1)...(291): n = A,T,C or G
ggcactgctcctgcaccgcncaaccactgatgacactatgtttcttggtgtcgntccctgcccagatgctgatctcattagtcgggtatcacttcagagccatgatgctggcaattgctctaacctcatggaggagaccaaaactttctcatcgactgagagtctgcgacaactttctcaacagctcaatggccttgtgtctgaggtaccacaggactgagacccacaaagaaggtanagaggaaaggaaagnatgttagaanatgaggngagattctcaagagactaatt

SEQ ID NO: 1477 - DNA, 224 bp, Homo sapiens
  misc_feature (1)...(224): n = A,T,C or G
agatctatgaagttgatttncatggagacatcgacctcctccnatgacagttgtgacagcgtttgccttctgatcattttgcaaacacaagtagtgcagttgaacagggaaggctgcaggacccgaagtcagtgccggcactccgggcctttcagggtagcaatgaagtttacggcacgaaatacccggagggcggccagnacaaaagcagcgcccccaaagcc

SEQ ID NO: 1478 - DNA, 548 bp, Homo sapiens
  misc_feature (1)...(548): n = A,T,C or G
gacaggagaccgaggcccaggcagggcaagcaagttggcccaggtcacccagcaagtcagttgtagagggcatctcctcccaaccaggcagctcccccagtggcactgtggtgtgaaatgtggatgtcccatgttcccggcctcctagccataaccctccccgctgacctcaagaatcacgtgtattaacaagactaatcatgatggaaggactgctccaagccccacgctgcacacatactgggggtcccctaggttggcccagccatggggatgtagtgtcctgtgtggccttggccctgtcctccacccactgccaagtacaatgacctgttctctgaaacatcagtgttaaccatatccctgtcccagcatgtgactgttcactcctgggagagacttagcccacagtacccctgggtgagagggcagggcaggggccatccccactcctgcccaaaccccacccnttgctatggtctgtgattttgaaagtgttaaattatggaagccctgagggcccctccttgcncccccccccccccacc

SEQ ID NO: 1479 - DNA, 415 bp, Homo sapiens
  misc_feature (1)...(415): n = A,T,C or G
ctcatagttgtggggattgactatgactgccgggagaggatggtctactggacagacgttgctggtcggaccatcagccgtgccagcttggaggcaggagccgaacccgagaccatcattacctcaggtttgataagcccggaaggacttgccatcgaccacttccgtagaacaatgtacctggacagatagtggcctggataagatagagcgggccgaactggatggttccgagcggaaagtcctcttccacacagatctggtgaatccacgagccatcactgtggatccaatccgagggttagctggcctttctttggtctctcatgcagatctgttttggagaccctggctcttatatatgncatgggaaggnctagatagaccagaataaaaactcaaatacagtaattca

SEQ ID NO: 1480 - DNA, 544 bp, Homo sapiens
  misc_feature (1)...(544): n = A,T,C or G
gaggtggggtctttcaatccccagtagagatgaagaatgaaaagtctgaagaagagcagagcagcgcctctgtgaagaaagatgagactaatgtgaagatggagtctgaggcaggtgcagatgactctgctgaggagggtgacctgctggatgatgacgataatgaagatcggggggatgaccagctggagttgaaggatgatgaaaaagagcctgaggaaggagaagacgacagagacagcgccaatggggaggatgactcttaagcacatagtggagcttagaaatcttatcccattattcatttacctaggcgtttgtgggagatacagtaacaccaggtcatctcccctggggtcttctgcacattctcactgttgtcccgccttaccctccctgtgttcattaattcatgattgccctgcgcctagttacagttccacttcctttgatgctccgtagtactttcgttaagtctnaccctgtaagttttgctttaattttgatacctctttgacttaacaataaaaagttgtatggtttt

SEQ ID NO: 1481 - DNA, 178 bp, Homo sapiens
  misc_feature (1)...(178): n = A,T,C or G
gagaggatctctgggaaagtttggaaagtgccagtggcaaacccatagcagctgtgatgaatacctggaccaaacaaatgggattccctctcatttatgtggaagctgaacaggtagaagatgacagagtgctgaagctgtctcagaagaagttttgtgcnagatggaccatatggcg

SEQ ID NO: 1482 - DNA, 523 bp, Homo sapiens
  misc_feature (1)...(523): n = A,T,C or G
gctcccgctgcgtttgtccccaacccatacatcatcagcgctgctcccccagggacggacccctacacagctggattggctgcagcagcgacactcggcccagctgtggtccctcaccaatattatggagtcaccgccatggggtgtctaccctgccagtctcttccagcagcaggcagctgcagcctgcagcagctacaaactctgctactcagcagagcgctccgcaggcccagcagggacagcagcaggttcttcgtggaggagctagccaacgtcctttgaccccaaatcagaaccagcagggacaacaaacagatccccttgtagcagctgcagcagtgaattctgctcttgcctttggacaaggattggctgcaggtatgccaggttatccagtcttggcacctgctgcttactatgaccaaactggtgcccttggggggaatgcaggggcaagaaatggcctcggagcngcagtccngatttgttgnttccagtcccantcatcattagctcctca

SEQ ID NO: 1483 - DNA, 544 bp, Homo sapiens
ctgagatgtctcagttcattgtccagtgcctgaatccttaccggaaacctgactgcaaggtgggcaggatcaccaccactgaagatttcaagcacctcgcccgaaagctgactcatggagttatgaataaggagctgaagtactgtaagaaccccgaggacctggagtgcaatgagaatgtgaaacacaaaaccaaggagtacatcaagaagtacatgcagaagtttggggctgtttacaaacctaaagaggacactgaactagagtgacctcaggccagagtggagtatgagcggaaaggatgaatcctgtggcttctgccctaccccacggccaaggctgtgctactgatgtgatgacccaccatcctgagcagttcaaacctgcaggtgtcagctgtaagctgcaaaagtgagctctgtctccaaatgacccctagttgtgagctgttggtgtaacagttacaggccatcagaggcagtagcctagggaagaccttggccacacgaccccattctcaaatctgggtctcccccttggcggt

SEQ ID NO: 1484 - DNA, 500 bp, Homo sapiens
  misc_feature (1)...(500): n = A,T,C or G
gaaaaactcaagaagtaacagatagaaagaaaattagcattttgaaaaacatagatgaaaaactcacagaagcagccagaaaactaggatactcactggaacagagaaccgtgaagatgagacagagagataagaaggttgtgacaaagacttttcatggtgcaggcttggttgttccagtagataaaaatgatgttggttaccgagagctccctgaaacagatgctgaccttaagagaatctgcaaggcagttgtcgacgctgcaagcgacgaggagagactgaaagcattcgctcccattcaggagatgatgacttttgtgcagtttagctaatgatgagtgtgattatggcatggggctggaattaggaatggacctctttttgctatggctctcattattttcacaaagttgcttggtcagcttttacctctttgcgtataatctattgaagagggatcngtttgcaaaaantattgaanaacatcctggccagca

SEQ ID NO: 1485 - DNA, 384 bp, Homo sapiens
  misc_feature (1)...(384): n = A,T,C or G
gtcatgtgcgttgttagcaacacatctaccagccctctgcatgactgaggttggggaaaagaaaaatagaaacagtccccaacctcacctgtgtgatgtggaggaaatgtgtattaccagtggggttttagcntgttcaatcaaaataataacaaatgtacaatttagcataacaaatcagagagcctctccagagaagttggtttctttgctgcgagaaggaggttctgaaaccttatccaagaacagaagccatcagccaagtctccacatttctctgcaaaatgtcatagcctctctaactgtatgataattgtaatgcatgccttcagttgtaagtggccagattgctctacagtgacattgaaacatgctttctaatgg

SEQ ID NO: 1486 - DNA, 109 bp, Homo sapiens
  misc_feature (1)...(109): n = A,T,C or G
ggagaccacatcaacaatgagaactggtggcagcccattatgaagttnatnaatgaccaatatgagaagcnccttgccggaggaagnttaacatcaacccggatgaagc

SEQ ID NO: 1487 - DNA, 491 bp, Homo sapiens
gggcctacaggtctattgttgtgagcccttcaccaacatgcccaaagatgagctggagaggatgctgcagctgtgtggggcttccgtggtgaaggagcttccatcgctcacccatgacacaggtgctcatctagttgtgatcgtgcagccaagcgcctggacagaagacagcaactgcccagatattgggcagctgtgcaaggcacgtcttgtgatgtgggactgggtgttggacagtctatccagctaccggtgtcgggatctggatgcctacctggtacagaatatcacctgtgacagtagtgagccacaagactccaatgattaatttaagaaatggtcttccatgcccggggagcacctctcagtctttggtgcttccacaccctacttactaagtatttttcatgcatccgcctggaaaaaccagcttctacctatgtgagggtgggtgccttaaaggttttctaaccaagtccccctttgaagtc

SEQ ID NO: 1488 - DNA, 390 bp, Homo sapiens
  misc_feature (1)...(390): n = A,T,C or G
actgagatggaccctgtacagaaagctgtgctctcccacacttttggaggacccttgctcaagaccaagcggccagtcatttcctgtaatgtctgtcagatccgcttcaattctcagnttccatggagaatggcctgggtccagctccaggatccccagagaaacagcctggctccccatcccctcccagtgttccagagtcngnacagggtgtaaccaagggngaagggggaacttcantcccagcttccctgcctgggggtagcaaggaataggaggagaaggctaagcgtctgctctactgngcactgtgcaaggtggctgagaactccctgtnccagcttgaggcacataacaaaggtatgggtcctctactcccaaaaaaaaaaa

SEQ ID NO: 1489 - DNA, 544 bp, Homo sapiens
gagtttctcttcagcaacgggtagcagaattggaaaaaattaatgcagaatttttacgtgcacagcagcagcttgagcaagaatttaatcaaaagagagcaaaatttaaggagctctatttggctaaagaggaggatctgaagaggcaaaatgcagtattgcaagctgcacaggacgatttgggtcaccttcggacacagctgtgggaggctcaggcagagatggagaacattaaggcaattgccacagtctctgagaatactaagcaagaagctatagatgaagttaaaaggcaatggagagaagaagttgcttcacttcaggctataatgaaagagacagtccgtgactatgagcatcagtttcacctgaggctggagcaggagcgagcacagtgggcacagtatcgagaatctgcagagcgggaaatagctgacttaagaagaaggttgtctgaaggtcaagaggaagaaaatttagaaaatgaaatgaaaaaggcccaagaggatgctgaaaagcttcgttctgtcgtgatgcccatgga

SEQ ID NO: 1490 - DNA, 539 bp, Homo sapiens
actgaggactcgtggtgactgtcacagaagagttcctggagttcatttctgatggtgcgctggcgattgaagtgtggggccacaggtgtgctgggaacggaagccccatctgggaggtggactcgctccatgcgaagacaaggacattgcatgacaggtggaatgaagtgacccggagaatagaggtgtggatctccattctggagctgaatgagctcggggattatgccgctgtggagcttcaccaggcgaaagacgtcaacaccggcggcgtcttccaactcagacagggtcactcccgtagagtgcaggtcacagtgaaacctgtacagcactcagggacactgccactcatggttgaagccatcctatcagtatccattggctgcgtgaccgccaggtccaccaagctgcagagagggctggacagctaccaggaagaagacttgaattgtgtaagagagagatggtccgatgcactcattaaacgacgggaatacttagacgaacagattaaaaaagtcagcaataaaaaaaaa

SEQ ID NO: 1491 - DNA, 549 bp, Homo sapiens
  misc_feature (1)...(549): n = A,T,C or G
tgaggaacctggcaagnctcagaaaacaggaaagaagttgctggttccggtaaacggaaacgactcagctgacgacctgaagtttatcttcgagtattgttcggacatagtgccctttgactcctggaaccgtctcatgcggcagttgggcctcacagacaatcaaatccaaatggtcagagccgaaacactggtcacacngtgaggccctgtaccaaatgctgctcaagtggcgccaccagactgggcgaagtgcctccatcaaccatctgctggatgccttggaagccgtggaagagagagatgccatggagaaaattgaagactacgcagtgaaatccgggaggtttacttatcagaacgctgcagcccaaccagagacagggccaggaggatctcagtgcgtttgaagtcagcctgatctacttagtgaactcaggacagccaaggctatgtagagagccccgaagatgcaggctcttcagtattatgagaatgtacttaattttttcttgtagtagttagtgtatcatattattgtattattgc

SEQ ID NO: 1492 - DNA, 494 bp, Homo sapiens
  misc_feature (1)...(494): n = A,T,C or G
gcggaacccaatgacncccttgaganggngttcgtatctgttgctanntntnctgatganagaaggtngaatggnccttatcaatagcaacgngnccnggtgtgttctgaaaaatccaaatgcatggtttcgccatcaggaggaatcaggacaagcctccaacgctcacgaaattctgtgaaagcatgtggagattcacttattatttatgtatcttctgctacggaatcagatttctctggtcgatgccttggttctgggatacccgacagtgctggtacaactatccgtatcagccactctcgagagagctgtattactattacatcacacaactggctttctactggtctcttatgttttctcagtttatagatgttaaaagaaaggacttcctgatgatgtttattcatcatatgattggcattatgctcaccactttctcctatgtcaacaacatggtgcgagtgggagcactcatcttctgtctgcat

SEQ ID NO: 1493 - DNA, 560 bp, Homo sapiens
  misc_feature (1)...(560): n = A,T,C or G
gaggttccaacaagtggcagctgtgtcttcggtctccccagcaacccccttccagaacataccccccaccgtgtcccagacacccgtcattgccgctacccctgtaccaaccatcactgcaaacgtcacgtcagttccagtccccccacccgctgcaccgcctcctcctgcgacacccatcgtccctgtggtccctcccacaccgcctgtagtcaagaaaaagggccgtgaagcggaaagcagacacaaccacacccacaacatctgccatcactgccagccggagtgagtntcccccaccactttcagagcccaagcaagccaaggtagtggcccgaagggagagcgggggccgccccatcaaacctcccaagaaggacctggaagatggtgaggtcccacagcacgcgggtaaaaagggaaaactgtccgagcacctgcggcactgtgacagcatcctccgggagatgctgnccaagaagcatgctgcctatgcgnggcccttttacaagccagnggacgcggaggcgctggagcttgcatgacttcttctgtctgca

SEQ ID NO: 1494 - DNA, 171 bp, Homo sapiens
  misc_feature (1)...(171): n = A,T,C or G
cgtggcttctggacaattacgagncagctggagggtgtgagcctgccccgcagctccctgtacaaccactacctgcgccactgccaggagcacaagctggagccagtcaatgccgcatcctttggcaaactcatccgccctgtctncaaaaaagagagagaaagaaaaaaa

SEQ ID NO: 1495 - DNA, 260 bp, Homo sapiens
  misc_feature (1)...(260): n = A,T,C or G
ctgctggcagaatggcaggcgatccaaaaaggcccagggtcccaaaagagtgtcattgtctctcagnggaccagcatgctgcangtagtagcactgcacctcaagaagaaccgacngacttatgccaccatcnanggcgtgtgntaaccccaancagagaatggacctgnnggaggcattnaaccactcacagggacctcangtcangctgatctccctcttggctggaggagttggacttaacctgactggaggaaaca

SEQ ID NO: 1496 - DNA, 174 bp, Homo sapiens
gactgagggattaatcctgcctataggactgaagatgccaacgaggacaccattggagtcctggtgcgcctgatcacagagaagaaaggctgctgccggcctcacccagcatacccctacatctccagccccacacacttgagtaataaaaggtggaaaatgtaaaaaaaaaaa

SEQ ID NO: 1497 - DNA, 555 bp, Homo sapiens
actgagaacctcagcgagctgatagaccggtttgtggcagatttcaaagcccagggcccacccaagcccaacactgacgaagggggtgctgtgctccccagctgcgctgacctctttgtctactacaagaagtgcatggtgcagtgctcacagctcagcacaggcgagcccatgatcgccctgactaccatcttccagaagtacctccgagaatacgcctggaaaatcctctctggcaacctgcctaaaaccagcagcagcagtggggggctgaccatcagcagcctcctcaaagagaaggagggctcagaagtggccaggttcactctggaggagctgtgtctcatctgcagcatcctgagcacagccgagtattgtctggctaccacccagcagctagaagaaaaactcaaagaaaaagttgatgtgagcctgactgaacgaattaatctcacaggagaaatggacacattcagcactgtcatctccagcagcatccagctgttggttcaagatctggatgcagcctgtgaccctgaaacaaaacaatggcgt

SEQ ID NO: 1498 - DNA, 389 bp, Homo sapiens
  misc_feature (1)...(389): n = A,T,C or G
tttgctttctcgtganaggccaagcagggtctcccgaaaagccgctctctgacctgggccggctctcctacctggcctactggaaaagtgtcatcttggaatacctctaccgccaccacgagaggcacatcagcatcaaggccattagcagagccacaggcatgtgcccacatgacatcgccaccactctgcagcacctccacatgattgacaggagggatggcaggtttgtcatcattagaagggaaaagttgatattgggccacatggaaaagctgaagaactgttcccgacccaatgaacttgatccggagagtctaagatggaccccaatgttaatttctaatgctgtggtttctgaggaagagcgagaagctgagaaggaggct

SEQ ID NO: 1499 - DNA, 340 bp, Homo sapiens
  misc_feature (1)...(340): n = A,T,C or G
tgagattgttaaagagncatgaaaacaacttatcagtgctcgccattagtaacatggaagcttcctctacccttgccaaatgcctttatgaacttaattttacagttcagagtaaagaacaagaaaaagactcagaaatgctgtagtgaatcctaccccactgacacagtggggtctcaaagtcaaatacatttcacatacntgttacntgaagaaagcaccaagtcttaatggagcagagaccatagaatgaattattttgtgtcctccatgatgctgagaggaaacttcgtattctgatctctgaacgaatccctttcttttctgttaaaaaaaaaaa

SEQ ID NO: 1500 - DNA, 323 bp, Homo sapiens
  misc_feature (1)...(323): n = A,T,C or G
aacatgaccagccaaggaccaggnctggagttctgttctacaacggtgaacagtgaaaggtctccaaagagatggagtacgacgcttacaacgacgtccggcatctatgatgatgagtactctgatggctttggctactttgtggacttggaggaggcgagtccgtgggaggccaaggtggccccggtcttcctggtggtgatctacagcttggtgtgcttcctcggtctcctaggcaacggcctggtgattgtcatcgccaccttcaagatgaagagtctggggaaactaataggttggggttttagccataaatgctgtat

SEQ ID NO: 1501 - DNA, 531 bp, Homo sapiens
actgaggagtgtatggtgatgtacatcgagtgaagattatgtttaacaagaaagaaaacgccttggtgcagatggcggatgcgagtcaagcccagctagcaatgaaccacctaagtggtcagaggctctatggaaaagtacttcgggctacactgtccaaacatcaagccgtccagctccctagagagggacaggaagaccaaggtctgaccaaggacttcagcaatagtcccctgcatcgctttaaaaagcccggctcaaagaatttccaaaatatcttccctccatcagccacacttcatctttccaacattcctccttctgtcacaatggatgacctgaagaacctgttcacagaagctggatgctcagtgaaggcttttaagttcttccagaaagaccgtaagatggctctcattcagttgggatctgtggaagaagcaatccaggctcttattgagcttcacaatcatgaccttggagagaatcaccacctcagagtttccttctcaaaatccacccccccccccc

SEQ ID NO: 1502 - DNA, 503 bp, Homo sapiens
  misc_feature (1)...(503): n = A,T,C or G
agtttctggctgctgccaagnaagctctgcgagaatctcttacaaacagttnatgctgagtattctagatttgtgaatcaaattaatactgctgtaccattaccaggctatacacaaccctctgctataagtagtatccctcctcaaccaccatattatccatccaatggctatcagtctggttaccctgttgttccccctcctcagcagccagttcagcctccctacggagtaccaagcatagtgccaccagctgtttcattggcacctggagtcttgccagcattacctactggggtcccacctgtgccaacacagtatncgataacacaagtgcaacctccagccagcactggacagagcccaataagtgctccttttattcctgctgctcctgtcaaaactgccttgcctactggcccccagccccagccccaactcccagctnagccacagtncacagaangaggcgattcacagaggagctgcctgatgaacgggat

SEQ ID NO: 1503 - DNA, 352 bp, Homo sapiens
  misc_feature (1)...(352): n = A,T,C or G
gggccactcattgccagnttncaacggtctnaacgtggaaggcatccggcaccgggagattgtcgatatcatcaaggcgtctggcaacgttctcaggctggaaactctgtacgggacgtncattcggaaggcagaactggaggcgcgcctgcagaaccttaagcaaaccctgtacgagaagtggggagaatacaggtcacttatggtacaggagcagccggctagcnacatggngagtaggtcgcggnngnncccacggatacccccagcagcnctncccctcntanaactcacagggatggcctggagcnactgcttgggacctgacattgncctaagctgataacacagg

SEQ ID NO: 1504 - DNA, 354 bp, Homo sapiens
  misc_feature (1)...(354): n = A,T,C or G
ctgtgggcagagtcagggactctggcnaagaacacaacggcctcacctgtgaanagctggcagaaaaggatgacatnnaagtnccggacatccattgaagaaaaaatgactgntgctnggattagaaaatgtcacaagtgtggaactggnctcatcaagtctgaaggctgcaantcgcatgtcttgccgntgtggtgcccagatgtgctacctntgtcgagtttttatcaatgggnatgaccatttntgccagcatactcgctctccaggannccctngccaagantgttccagntgctcnntgtggaccgatcccactgaagnatgatgaaaagttgattgaggaaatccaaa

SEQ ID NO: 1505 - DNA, 533 bp, Homo sapiens
  misc_feature (1)...(533): n = A,T,C or G
attgaggtatcccagcatcttcaggaacactttagactctattcaagacgacaatcctccacactggctaaaatccctacaggccctcacagagatggacggccccagcgctgcctcgtcacaaccccatcacagcgcccccttcagcacacagatccctctgcacagagccagttggaacccctacccacctccttcaaatccctccagcttccactctccacccccaggcttccagacagccttcagaccccccagcaaaacccccacagatctgctacagagttccacactggaccgccactaagcaaagagggaattgaaaagggcaggatttgtcccaccctgttccccctcagcccactcacagctcccttctcatctcttaacgttctgaagaatccagctcctggncgggtttttttctccctacccccagatacgatgcgatcacagcgtctttaccatcttttctttcattgtaaaaagtttcggttgatccagcatttgagtgantgacactgttgaatgtt

SEQ ID NO: 1506 - DNA, 553 bp, Homo sapiens
  misc_feature (1)...(553): n = A,T,C or G
actgagctgtgtatgatcggatgcgagcagntcagaagaaatttggcaaagcatcgtgggcagcagctgctgagcgaatggaaaaactccagtatgcagtttctaaagagactttgcagatgatgagagctaaagaaatttgtctggaacagaagaaacatgcactaaaagaagagatgcaaagcttacagggtggtacagaagctatagctcgattggatcagctggaatctgactactatgatctgcaacttcagttgtatgaagtacagtttgaaatcttgaagtgtgaagagttgttattaactgcacagctggagagcatcaagagacttatatcagaaaagagagatgaagtggtgtactacgacacttacgaaagcatggaggccatgctggagaaggaagagatggcagcgtctgtgcacgcccagagggaagagctacagaaactgcagcagaaggcacgccagctggaagcaagaaggggccgtgtctcagccaagaaagcctacctcagaaataaaaaagtattgaaatcttgaaaaaatgc

SEQ ID NO: 1507 - DNA, 502 bp, Homo sapiens
  misc_feature (1)...(502): n = A,T,C or G
ggccaatcggatagangattccagggagaggatgaatacgctgcngaagctgatccggnatctnccaggacactactatgaaacacattaaattccttgtggnccatctcaagaccattgctgaccactcagagaagaacaagatggaaccccggaacctggctctggtcttcgggccaacattggtaaggacatctgaagacaacatgacagacatggtgacccacatgccggaccgctacaagatcgtggagacgttgatccagcattctgactggttcttcagtgatgatgaggacaaaggagagagaacccctgttgatgacaaggagccacagtcggtgcccaacatcgagtacctcctgcccaacattggcaggacagtgccccccagtgatccaggctcagattccaccacctgtagctcagccaagtccaaggttagtaccatggcttcccaaatgtggtttgcctggacaaggcagcccactgtagtttgtgg

SEQ ID NO: 1508 - DNA, 322 bp, Homo sapiens
  misc_feature (1)...(322): n = A,T,C or G
ataccagattcatcagtatgggagaatcaagattctacacaaacaaatggaattgattctgttctgtcaaaagctgagattgcttcttgtagttatgaagccaggtatgtagaagctaagtgagctctaattcttaatgaatagttagtttttatgtacttttagaaagatatgtcttgcacatgaagcctttgatttcaacatatattaatacngtatgaaaagaaatatttttatcctgagtccttcttttacactgcatgttaattttaaataatataatagctcctcatgatatatcctccagtgaaaccaaaaaaaa

SEQ ID NO: 1509 - DNA, 139 bp, Homo sapiens
gactgaggcctcatgaatccatagcaatggctcgatcaaggggtccaatccagtcttcaggaccaacaatccaggattatctgaatcgaccaaggcctacctgggaggaagtcaaggaacagctggaaaagaaaaagaa

SEQ ID NO: 1510 - DNA, 179 bp, Homo sapiens
  misc_feature (1)...(179): n = A,T,C or G
tgggtatttggtgggcctggctaaccaggagggaggggtgngccagacaagagccatgaagatcctcatgagaatttagcaggncacactgnggggattccagtttaacatgcgggtccctnctcctctactaccccatccntgcccttccagagaataacaggaagccttcctttttt

SEQ ID NO: 1511 - DNA, 538 bp, Homo sapiens
  misc_feature (1)...(538): n = A,T,C or G
gactgaggaaacagttgccaggggtgggcaacatantangactgcanntcaaagatcacattgtcctcncagtagggccagatnagantccatttgatgaagctcancaaaaggtggtttacatctatcattctctgaagaatgtgaggcatgatgcacatgatatggagaagaggaggaatccganattntcngncttcgctttccttnatcacatgnggatgctctgaagcaaatctggtgcggntcaccaatncgngntaaggacctgaaacttgacacagatgaagaanaggngaacctggcactgtctctctggtcggagtctttaatccaagtnctctagngcctttatgcanagaattgntgattttctctatacatacattcagtgagcggggagggggcttggcgctctggttagtactgngggtggaggngtngagacctagaggagcaaggcagaagaagctggttcatgtncttgnggacacgacaggaanaccaggaaattattaggcntcccagactctgataa

SEQ ID NO: 1512 - DNA, 209 bp, Homo sapiens
gactgagcttaccgagtcatcataacttgcactgaagacctaccacgctgtgctattccatcccgcctggggctacccctcctctctcctgagttcctcctgactggagtgctgaagcaggaagccacaccagaggcctttgttctctccaatttggaaatgtcatctacctaaaaaaatatgtacctttaccttctcaaaaaaaaaaa

SEQ ID NO: 1513 - DNA, 472 bp, Homo sapiens
gactgagggcctgatgatgctcaacaaaagaagaaccacatcacacagcagtccttggagaaggtgacgctgtccagttggaaaataaggaccccaaaagaagccattttgtcttaattgctggggagccattaagagaaccagttgtccaacatggtccatttgtgatgaataccaatgaggaaatttctcaggccattcttgatttcagaaatgcaaaaaatggttttgagggggccagaacctggaagtcaaagattggaaactaatgaagagctgagacgctgccacttggatggactggccattcggtatattaaatttccaaggctagtttagctggtgcttctgaagccacattaagctgggcttagtgatgcagagtcctttaatcccagcactctaggagtcagagacattgggtatctccgatttccaagcccatctgtcttgaaaatggaaaaataaaaaa

SEQ ID NO: 1514 - DNA, 468 bp, Homo sapiens
  misc_feature (1)...(468): n = A,T,C or G
gaccagcctttcttctggaacttcangcanatgngggacagtnagaaaattggnctannacngcaccactgccggnagngtgggaaggccgngngcaggcangacgtagcctccaagcngctcttccatnccactcatgggcatttgagtttgaagagccgggtntgcggacaggtgncacgaggccatcacagatnaagaacgcncccccacagccanccttccatgacggtgagcataanantgtgcatgtgcatttagatgcaaccaggngatggntactgncttctggaactganacnggtaantaagnatgtgggacatgaccccagnggtganatgatnactcncccagggactanganacagtgtccctgaagaancacttgagtncagcatcctccnggnaggaggaaagagagcttctggatgagcaanaagagagaccgaggctcccagcgagtgtgg

SEQ ID NO: 1515 - DNA, 384 bp, Homo sapiens
  misc_feature (1)...(384): n = A,T,C or G
ctgcgaagttttgctcctggacgagtccaagctcaccctcaccacccagcagcagggcatcaagaagttaaccacaggaggtcagttctgggcatttcttctggagagtctgctttgattacctttatgcccatcagaactattcctggccagaagccttttcttggatgttgtcagtttggacatacagaattaggatttcatgggtgtaatcctcttgcagaagaaaggcaaacgtgaccaattaaagctaaaacacttaaccccttgctttggaaagncgttttgaatgttgtttctcaggaattataataagcaaaattcaatcaaattctcatctttagatttttcccaagagcaataaaccactatttgtagggaaaa

SEQ ID NO: 1516 - DNA, 426 bp, Homo sapiens
gactgaggtggggtctttacccggtcctgcgaccggagccagccctacaccccgcgccccatctcttcgggttgcgtgcagctgcttttccagcccttcccggtgtttccccgggaaacgttcccttcctctacgccgccctccaccaggtttcaggaaggaagttacaggaactttccctctacttttgtttgctcggccttgcagtgacgaagagcagagcaactcagaagtttgggtcaacagccctatccatttccaaccagcaaaacccgagttgtcccccaggcctccttgaaacgagcccctcccgactctacacttttcctccctccctcccaagccccgaacccaacagtaagctctctaaggcctaacactttgcaatttagccataaaaactgtcagcacacccaaaaaaaaaaa

SEQ ID NO: 1517 - DNA, 233 bp, Homo sapiens
  misc_feature (1)...(233): n = A,T,C or G
ctgagggagctctgttcagcagtntggcctcagtgttcctgtgatcatcatcaaacaagaggaggcctgtcagtgtcagtgcgcgtgccgggactctgcgaaggagctgggctggccggccggagaaagggatgttcttccccaccccctccagagccgaacccccagcctcctgatgggcccagcctgcagctgccaccctagacttctccctcatccctgccccccccccc

SEQ ID NO: 1518 - DNA, 207 bp, Homo sapiens
  misc_feature (1)...(207): n = A,T,C or G
actgaggaggtacaagaggaaaataaattccttaagtgccagctcagtcaccagtaagcaccaacaggcntcttttccctctcaggaagaattacnaacagtgntttgagaaaaagagaaagaaataacgtgatctctgcnactgagttangagtctttgnngaatgcctgttgaacaccagaggaanaaaaacaatgaccgacggc

SEQ ID NO: 1519 - DNA, 397 bp, Homo sapiens
gactgagctatgtgctcctcggtgcagaggccctgtttgaggaagaggaccatgtcaagaagctgcagcagaaggtggccaccctggagaagcggaacaggcagctccgagagcgggtcaagaaggtcaagaggtctctgaggcaggcacggaagaacagccgccacctggagctggtgaaccaaaaactcaatgagaagctaggggcctccagtgctcagcagcacattaacgctctgggccgggagcccgtgcgtgccccctatctgcatgggtagcaggggcaggtggatgctggcctgccttgcctgtgccggctgactgagaacaaccgcaagctctatatatgcacttacttcaaacattatagtagctatccatttggcaaaaaaaaaaa

SEQ ID NO: 1520 - DNA, 277 bp, Homo sapiens; identical to SEQ ID NO: 54

SEQ ID NO: 1521 - DNA, 202 bp, Homo sapiens
atctgagtcaccgaggctctggcctgggcaagagaggagcagctgaggcccggcggcaagagaaaatggcagaccctgaaagcaaccaggagacagtaaattcctcagctgcccggacagatgaagctccccaaggagctgcaggtatactgactggcacttaaaacacacatatatttttgttcgtttcacaaaaaaaaaa

SEQ ID NO: 1522 - DNA, 486 bp, Homo sapiens
  misc_feature (1)...(486): n = A,T,C or G
gaagatgggaaggagtatcatttcatctcaacagaggagatgacgaagaacatctctgccaatgagttcttggagtttggcagctatcagggcaacatgtttggcaccaaatttgaaacagtgcaccagattcataagcaggacaagattgccatccttgacattgagccccagaccctaaagactgttcggacagctgagctttcacctttcattgtgttcatcgcacctactgaccagggcactcagactgaagccctgcagcagctgcagaaggactctgaggccatccgtagtcagtatgctcattactttgacctctctttggtgaataatagngttgatgaaactcttaagaaattgcaagaagcctttgaccaggcttgcagttctccacagtgggtgcctgtctcctgggtttactaagcttacagaattggcaaacatgtttcagccagcatttggaatgccacctccccgcgccca

SEQ ID NO: 1523 - DNA, 508 bp, Homo sapiens; identical to SEQ ID NO: 55
  misc_feature (1)...(508): n = A,T,C or G

SEQ ID NO: 1524 - DNA, 498 bp, Homo sapiens
  misc_feature (1)...(498): n = A,T,C or G
acgtgtccgtgcccccacgggtggaggtgatgcgaggcgagcaagtcgccctggactgcactccacgggagcaccctgagcattacgtgctggaatggttcctcgttgatggtactggggctcgacaccgtctggcttctgtggaaccacagggctcanagttcctgggcacagtccactctctgggccgcgtacccccatacgaggtagactctcgtgggcgcctggtgatagcaaaggtccaggtgggctgatggacgggactacgtgtgcgtagtgaaggctgggncagcgggtacctcagaggccacctcaagtgtccgtgtgtttgcaacaccagaggatacggaggtgtctcccaacaaagggacgctgnctgtgatggaccagtttgcccaggagattgccacctgcagcagnaacaaacggaaaccccgtgcctcggatcacatggtaccgaaacgggcagcgtctgnaantacccatggcaggtgaacc

SEQ ID NO: 1525 - DNA, 361 bp, Homo sapiens
  misc_feature (1)...(361): n = A,T,C or G
ggcagcttctactcttgcaaacttggccatctccatcactgggtatgagtccagcactgaagaccagccctctgaccctccgacagagcccacagacaagggagaaccccctccagcattgtctgcttcttcttcatcctcctctcgttcctcaccctcttctccttcacctactttgggcagacagaggccctgagatgggaacatttctcaggaagaagaaaacgagtgacatctacttcntgtctcttgtgngggccattattgctgnccagctttggctgaatctgtggatcgtacanctgntgccagcngcctgntgcagtctggatcatcaaaaagctcgtgatccactttggag

SEQ ID NO: 1526 - DNA, 536 bp, Homo sapiens
  misc_feature (1)...(536): n = A,T,C or G
cactgaaaggaaagtgacctgcaagcatccggttacaggacagccatcccaagacaactgtatctttgttgtgaatgatcagactgttgcaaccatgacgtccgaagacaagaaggaacgacccataagtatgataaatgaagcttccaattacaacatggcttcagattatgcagtgcatcccatgagccctgtgggcaggacctngcgnncctccaaaaaggttcataatnttgggaaaaggtncaattcaattaaaaggaaccctaatgcacctgnggnccggcgtggctggctgtatanagcaggacagcaccggcatgaanctgtggaagaagcgctggttngtgctctctgacctttgccttttctattaccgagatgagaaggaggagggtattttgggaagtatcctgttgcctagttttcagatagccatgctcactgctgaggaccacatcaatcgcaaatatgcttttaaggcagcccacccaaacatgcggacctattatttctgcaccgatacaggaaaggag

SEQ ID NO: 1527 - DNA, 504 bp, Homo sapiens
gatctgagaaggaaagctgaaggtgcacatgcggaagcacacgggtgagaagccgtacctgtgccagcagtgcggcgccgccttcgcgcacaactacgacctgaagaaccacatgcgggtgcacacggggctgcggccataccagtgcgatagctgctgcaagacctttgtgcgctccgaccatctgcacagacacctcaagaaggacggctgcaatggggtcccctcgcgccgcggccgcaagccccgtgtgcggggtgtgccacccgatgtccctgccggggccggcgcaccccccgggctcccggacgccccgcgcaatggccaggagaagcactttaaggacgaggaggaggacgaggaggaggccagcccggacggctcaggccgcctgaatgtagcgggcagcggaggagacgatggtgcaggtggccccggcggtggccaccgccgagggtaacttcgcaacctgactcgtattaaaacaaaccaaaaacaaaacaa

SEQ ID NO: 1528 - DNA, 520 bp, Homo sapiens
ctgaggtacgatgattactactattatggtccacctcatatgcctcccccaacaagaggtcgagggcgtggaggtagaggtggctatggatatcctccagattattatggatacgaagattattatgattattatggttatgattaccataactatcgtggtggatatgaagatccatactatggttatgaagattttcaagttggagctagaggaaggggtggtagaggagcaaggggtgctgctccatccagaggtcgtggggctgctcctccccgtggtagagccggttattcacagagaggaggccctggatcagcaagaggcgttcgcggtgcgagaggaggtgcccaacaacaaagaggccgcgggcagggaaaaggggtcgaggccggtcctgacctgttacaatgaagactgacttgctattgtgggattacaccagaagcttgcagtggagtaatggtaaggaaaatcaagcaaccttaaatatctcggatgtataggagcatattctctg

SEQ ID NO: 1529 - DNA, 333 bp, Homo sapiens
  misc_feature (1)...(333): n = A,T,C or G
atttgggtgccgtctttcaagtttttggagcacangcctggcacctctgccaggggagcttcgcatatttaagtaaataaacttagcatgctggatgcacgtgacactgactgacttcagggatttggccaggagtgtgatggacatggggacaaagagaccattttggctgctggaggacagggctctcttgatctggaagccaactgcaaaggcagcgcatagtcttagaatcccattctgtgcacatcgttgaacgaagcaagtctttgcacatcttcaattggaatcgngccactgatgataaacaaaatgagagccaaaaaaaaataa

SEQ ID NO: 1530 - DNA, 499 bp, Homo sapiens
atctgagataacccaggcacatggtggcactgtggaccccactttcacaagccgatgtacacacctcctctgcgcaagtcaagtcagtagtatgtacacacaggcactacgggagagaaagcggtgtgtcactgcacactggctcaacacagtgctgaagaagaagaagctgatgccccctcatcgagccctgcatttcccggtggcgttcccacctgggggcaaaccctgttcacagcatgtgaggccatcccctctcctgcttgacattccatagttctgtcccagacccctgtattgcctttcacccctgcgtgccatggctatggtagcagtgcctggcacaagatatgtcattttcccttgctgacacttcaaaacctaggatgagtcacccactgttagatagaactcatgggtacttgccaccagttgacccagagcctggaccattgagaagaataaagacctaccctgtgtgtgtgctcaaaaaaaaaaa

SEQ ID NO: 1531 - DNA, 551 bp, Homo sapiens
  misc_feature (1)...(551): n = A,T,C or G
tgagtacaccaggagattcttnccggtcaaatctttttgaagatgcaacaagtgcccttgtgacaggtcagtcttatgagaatatggtaactgagatcatgtcaatgggctatgaacgagaacaagtaattgcagccctgagagccagcttcaacaaccctgacagagctgtggaatatcttctaatgggaatccctggagatagagaaagtcaggctgtggttgaccctcctcctcaggctgtgagtactggaactcctcagtctccagcagtagctgcagctgcagcaaccacgacagcaactacaacaaccacttctggaggccacccccttgaatttttacggaatcagcctcagtttcaacagatgagacaaattatccagcagaatccttctttgctgccagccttgctacagcagataggtcgggagaaccctcagctgctgcagcaaattagccaacaccaggagcattttattcagatgctgaatgaaccagttcaggaagcaggcggtcaaggtggaggaggcggtggcggaggagcaact

SEQ ID NO: 1532 - DNA, 535 bp, Homo sapiens
  misc_feature (1)...(535): n = A,T,C or G
tccgtcagcacagccttntggctcagttccgcaacctgggacaaaatgagcctcacatgccactgaacgccacgttcccagactctttccagcagcccaacagccacccgttcccccactcccccaacagcagctaccccaactctcctggcggcagcagnagnaccgtaccctcactccccaaccagctcagacccgggcagcccttttcagatgccagcatgacacaccnncacctgnttacctgcctcctgaagaccccatggtccaggatggctntcagcccatggacacgaacatgatggcgcctccactgcccgctgaaatcagcagaggagangctcaggcagtngcttacgangaaccaaaacnctggtgcnctattgngtactatgagcttcaacaacccgtgngggtngaagcngttccacgcctngtccaccagcgngcttggngnatggttncacanatccncccaacaataagaacctgtttttgccttggccttggaggaggcggtggcggaggagcaact

SEQ ID NO: 1533 - DNA, 551 bp, Homo sapiens
  misc_feature (1)...(551): n = A,T,C or G
actgaggaagcccgccctgtctcccagctggtcgcacagcaggtcacgcagcagttcgtgccccctacccagtcgaagaaagagaagaaagaccgagtagagaaggacaagagtgagaaggaagctgctagcaaaaagaactgtcacaagaaaaccagaccaagattaaaaaatgtggatcggagtagcngctcagcatttggaagtcactgttggagatctaacagtcattatcacagactttaaggagaaagccaagtcagcgcctgcgtccagcgctgctggcgatcagcacagccagggcagctgcagctcggacagcactgagcggggcgtgtccaggtcctcctcgccgcggggagaagcctcctccctcaacggagagtctcactaaccgttcttgctccacttagtcatgcctgtcctccatggagatgcagagtatgccaacaactaccacattttcatgacagacacactcatgcataacctataatttgagttttacacgaaatacgaatttgccaggatttattagattttattcaact

SEQ ID NO: 1534 - DNA, 156 bp, Homo sapiens
  misc_feature (1)...(156): n = A,T,C or G
gctcggggacgtgtccccacctnattgtcagcaggncgacacgcgcaggggccattcttgacggncatctctgtagnanagcacattggcgactccggactggntggaggagtgnttcaagcgccagacnttnatntatgagcagaactacatcct

SEQ ID NO: 1535 - DNA, 505 bp, Homo sapiens
gagaatgcgagataaaatgagaaaatggcgagaagaaaactcaagaaatagtgaacaaattatggaagttggagaagaattaattaatgattatgcttctaagcttggggatgacatttggatcatatatgagcaggtcatgattgcagccctagactatggtcgggatgacttggcattgttttgtcttcaggaattaagaagacaattccctggtagtcacagagttaagcggttaacaggcatgcgatttgaagctatggaaagatatgacgatgctatacaactgtatgatcggattttgcaagaagatccaactaacactgctgccagaaagcgtaagattgccattcgaaaagcccaggggaaaaccgtggaggccatccgagagctgaatgagtatctggagcagtttgttggagaccaagaagcctggcatgaacttgcagaactttatatcaatgaacacgactatgccaaagcagctttttgcttagaggagctg

SEQ ID NO: 1536 - DNA, 473 bp, Homo sapiens
  misc_feature (1)...(473): n = A,T,C or G
tgtgatggaccggtctgtggaacatgacaaagcttcaaaggatgccaaatatgaactggtaaaagcacttgccaattccaagacagttgcagagatctttgggaactcaaattatttgaggctcagagctgtacctaagtgaaggtccatactatgtgaaacctgntgccacaacagcagtagaaggggctgactgatccctttccacctaaaacagcagaatttcccaaggcacacgattccatccgtgctccacaccacaggacgtatgtcttcccaggcacagcctcaccatcagcagtgttgtccctacttaatgctgtgtagactcggcctcttgnnaaagcagtaggagcctgagagtgctcgngtttccccgagtcctctggttgccaaagtctctgntgcaaggtcgaggnntgtntcnctcaaagcttccatgggcacactcatgacatttttataaaataaaa

SEQ ID NO: 1537 - DNA, 373 bp, Homo sapiens
gactgagggagcacaagctttgctgactcctctacaggttccgacacctgaagatgcccgtccgggctttgctaagactggctcctgtgctgcttgggaacccacagccgatggtcatgtgaccacctctgccgagggaaacccaccctagaaatgactgcggcacagaatcctgatggcagcaaagtgaaggcagcatttctgttttgtaaccaatggaactcagttgcatacgcctcactgtgcttaaaattcatgttgaaaataagacagataacgctggtgctgtccacgtgtcatatgatgtataaaacatcagttaaaactcacattttgtaaataaagatttttggtttgttttcaaaaaaaaaaa

SEQ ID NO: 1538 - DNA, 453 bp, Homo sapiens
  misc_feature (1)...(453): n = A,T,C or G
actgagggtcggaggctgtcagggcctcagcttctgccggtgagagcgctcaatgaagtcttcattggggagagcctgtcatccagggcttcctactatgaaatttcagncgatgacggcccatgggagaagcagaagagctcagggctcaatttgtgcacctgggacaggatcagaaggcctggtcattcaatattaacagggttgcagcgcaggctgttgaagatgttntacatattgcaagacgacanggaaatctgactcttccattgaacaaagacttggtagaaaaagtgacaaacgaatataacgaatcattgctctacngtccagaagaaccaaaaatacnttttcagtattcgagagccaatagcaaacagagttttctccagcagccgtcagcgttgtttctcttccaaagttngagcncgnccttgatgttgggagcctgct

SEQ ID NO: 1539 - DNA, 279 bp, Homo sapiens
  misc_feature (1)...(279): n = A,T,C or G
caacattgccacaggagagcagcatgcnggaagctctggagcttttgggcaacttcaaagataaggaacgcaccacaattgctcagcaagtcaaagggaagaaagtctggataggaatcaagaagntactaatgttgatngagatgnccctgcagatggatcctgagtaccgtgtgaggaaattcttggccctcatgagagaagaaggcgctaagnccccnggactttgatnganaacggactgtttacagacagtgaccaaggggaagcgacccaagg

SEQ ID NO: 1540 - DNA, 291 bp, Homo sapiens
  misc_feature (1)...(291): n = A,T,C or G
cctctcactgacagtggaaagctgtatgcccttgatgtcctgttgactcggctcaagtctcaaggacatagggtccttatctactctcagatgaccagaatgatagacctgctggaggaatatatggtatacaggaagcatacctacatgaggctggatggctcgtccaagatctcagagagacgggacatggtggctgattttcagaccaggaacgacatctttgtgtttctgttaagcacgcgagctggnggactgggtatcaatctcacagctgcagacacagtttag

SEQ ID NO: 1541 - DNA, 394 bp, Homo sapiens
  misc_feature (1)...(394): n = A,T,C or G
actgagaactggttcagaaaggagcaattgagaaagaagttgtgaatcaggcccgtctagaccaagtcattgctggggcagtccacaaatcagttcgaagagagcttgggctgccggagggtagcccagccccaggcttactgcagttgctgacactgataaaagataaggaggccgaagaagaagaggtcctccttcaggccgaattagaaggctattgcacttgacccaagacccaaggctgtcatgagcagaacaagatggaagagctcattgcagagatcagcccatccactctttatgctgccaaagtaactcgccctttgtcgtgttgtttacntgaatgtctccccaatgttttactgataaaaatgatgtcattcaaaaaaaaaaa

SEQ ID NO: 1542 - DNA, 187 bp, Homo sapiens
gactgaggtgctttagggaatgaatttagcatattaagatcgccagggtctgttgttttccgaaatggaaattggcctataccaggagatcgaatcccagacgtagctgcactgtccatgggcttctctgtaaaggaagtatgtatacttaaaaataaatagttgtaactgcttttaaaaaaaaaaa

SEQ ID NO: 1543 - DNA, 456 bp, Homo sapiens
  misc_feature (1)...(456): n = A,T,C or G
cctacttcttggcgaaagccaaatctcctaantccaccgaccaagagggaaccctgaagcctgaaggaattacatgaggccaaacctccagctacagcctgcctccaagaaggggcccacagccctagtccagtccatgtgggctctggggaccatgactattgtgtccgaagcaggacacccccaaaaaggatgcctgccctagtcatcctcagaggtgggctcacgatggaatgtcaagccgccatcaggacatcaccatcaagcctgtgttgtcattgggctcagntgcacccccactcccatgcacggctacttcccaggagcctcttgatcacaggactagcgttgagcaggcagatccttcancgccttgttttgccccatccaccttgctgtctcctgaggcttcaccctgccggagtgaaatgaacgctaggactccccctgaaccct

SEQ ID NO: 1544 - DNA, 473 bp, Homo sapiens
  misc_feature (1)...(473): n = A,T,C or G
actgaggtggggtctttcatgaatcaagcatgcattcaagtggagggctctcgccaggcactagctcttcaggactgngcagctnagcggtgcaccatctcctaccgggcacctnaactttntnctgtgcaaagccacctgtgtcatcgatgagcggactgatgtntggnccctaggcctgggtgctttatgccatgatgtttgggganggcccttncnatatggtgttccanaagggngacagngtggccctngctgtgnaaaatganctcancataccacaaagccccaggcattcttcagcattgcgacagctattgncttctatgatgactgnggacccccagcagaggcctcanatccctgtcctactcagtcagttggaggnattgnagccaccagntcctggccagancaccacccaaatttgatcaaatcagtggacatattgggaanatgaccttgaagaggct

SEQ ID NO: 1545 - DNA, 368 bp, Homo sapiens
  misc_feature (1)...(368): n = A,T,C or G
cccctggacaccatctactcttacgtcagaccagagaggctgagtccagtcagccacggaaacacaatcgccctcttcttccggtccttgttgccaaattataccacagagggggagaggctggaggaaggagtggccgggggtccgaaccgcaatcaaggcttgaacaggctgatgttggccgtacgtgacatgatggccaacttccacttcaacgacctggaggtgcctcgggaggacaatcctgagggcgagggggactgggactgaactgtccagatgctgtgcccagagccgtgcagtcacgttcccgaattcatttctggttggagttaaccagttccnagtagaaatgctgaccatgccaa

SEQ ID NO: 1546 - DNA, 504 bp, Homo sapiens
  misc_feature (1)...(504): n = A,T,C or G
gactgaggggaggtgaagaccctgntgattcagctgctgagtggggtaaagcacctccatgacaattggatcctacaccgtgacctgaagacctctaacctcctgctgagccatgctggcattctcaaggtgggcgactttgggctggctcgggagtatggttcacccctaaaggcctacactccagttgttgtaaccctgtggtatcgtgccccagaactactgcttggtgctaaggaatactccacagctgtggacatgtggtcggtaggctgcatatttggagaactgctgacacagaaacctctgttccctgggaagtcagatattgatcagattaacaagattttcaaggacctgggtactcctagtgagaaaatctggcctggctataatgacctcccagccgtcaagaagatgaccttcagcgagtatccctataacaacctccgcaagagatttggggctttgttatcagatcaaggctttgatctcatgaacaat

SEQ ID NO: 1547 - DNA, 181 bp, Homo sapiens
  misc_feature (1)...(181): n = A,T,C or G
gtgggagatcttcactctgggtggctccccataccccggtgtgcctgnggaggaactttncaagctgctnaaggagggncatcgaatggacaagcccagtaactgtaccaatgagctgtacatgatgatgcgggactgctggcatgcagtgccctctcagagacctacgttcaagcagttg

SEQ ID NO: 1548 - DNA, 359 bp, Homo sapiens
  misc_feature (1)...(359): n = A,T,C or G
gcagaggtacgtgtttgacatcagtgccttggagaaggatgggcctgttgggggctgaacctgcggntcttacnggaagaagcccttggacgtggccaagccagcggtccccagtagcgggcgggttgcccaactgaagctgtccagctgccccagcggccggcagccggcagccttgctggatgtgcgctccgtgccaggcctggatggatctggctgggaggtgttcgacatctggaagctcttccgaaattttaagaactcagcgcancntgtgcctggagctggaggcctgggaacggggccgggccgnggacctccgtggnctggncttttaaacgcacctggccgacaggttc

SEQ ID NO: 1549 - DNA, 492 bp, Homo sapiens
  misc_feature (1)...(492): n = A,T,C or G
tgtgcagttgacccccctgtgttttatgcatggagtgcttcctgggaagtatccatagagaccatcgatataggatgaccacatcgggaggagggggcttctgtgactgtggtgacactgaggcgtggaaagagggaccttactgccagaagcacaagctcagcagctctgaagttgtggaggaggaggatcctcttgtgcatctatcagaagatgtgatcgccagaacttacaacatttttgctattatgtttcgatatgcagtagattatactgacctgggaaaaagaaagtgaattgcctgaagacttagaagtggcagagaagagtgacacctactactgcatgctgtttaatgatgaggttcacacctatgagcaagtcatttatacccttcanaaagctgtgaactgtacacagaaggaagccattggctttgcnactacagttgatcgagatggccgtangnctgnccaataagtacattttcca

SEQ ID NO: 1550 - DNA, 481 bp, Homo sapiens
  misc_feature (1)...(481): n = A,T,C or G
aagagagattggcctggaataaaaactgatgatcggaatgattacaggagnatgtatcctgntcggaaatcntttctcagaggnaacnatgcnggnagcccagtctcggatcnctatatgtgaanactatanacncttcatttntgaccctgcnngagcannaagacncttatnagaacagcnactaaaccggtnttttnntcatcttgacatcagatccaaacagaacttacaggaaactgtgaacgatttagatgangggcgnaaagaagtactttgagacngancgagatggctcntgcatgacgaganaacgctgacatcgnatcaaagacctnntcttatcactttttcttncaanaatcnnttnacaaancncgagggngannttntttgcccggcgancngantgtaataccaaagctacccatgcaaggaatgannaccttctgacgctagcagcagctaacgcacataagcg

SEQ ID NO: 1551 - DNA, 502 bp, Homo sapiens
  misc_feature (1)...(502): n = A,T,C or G
agctcgccgctgtccaagaaacgtcgcgtgtccgggcctgatccaaagccgggttctaactgctcccctgcacagtctgcgctgtccgaagtgtcctcagtgccaaccaacggaatggcgaagaacggcagtgaagcagacatagacgagagcctttactcccggcagctgtacgttttgggccatgaggcaatgaaaatgctccagacaactacataccagctaatccactaaacaccccaccccatattaaacccgaatgatatttcctatttgcatacgccattctacgctcaatccccaataaactaggaggtgtcctagccttaatcttatctatcctaattttagccctantacctttccttcatacctcanagcaacgaagcctaatattccgcccaatcacacaaattttgtactgaatcctagtagccaacctacttatcttaacctgaattgggggccaaccagtagaacacccatttattatcattggccc

SEQ ID NO: 1552 - DNA, 504 bp, Homo sapiens
  misc_feature (1)...(504): n = A,T,C or G
aactgaggtatgagaaagagaaccgccaaaaggagtgagtgatgctcagtgacctgcgctcaggctggacgctcgcgcctcgggactcctacaggaacattgcgctagctcctgggagcagctttgcatctccttagtgctcctctgcttcaactgctcaagccagctgacctcgaatggctacccaaaggaaacacttggtgaaagacttcaacccttacatcacctgctacatctgtaaaggctatctgatcaagcccacgacagtgacggaatgcctccatacattctgtaagacctgtattgtccagcactttgaagacagcaatgattgtccaaggtgtggcaaccaagttcatgaaacaaatccattagaaatgttaaggctggataacacgttggaggaaattatctttaaattagngcctggactacgagaacaagaacttcagcgtgagttggaattttggaagaaaaacaaacctcaagaaatgggctctgcct

SEQ ID NO: 1553 - DNA, 330 bp, Homo sapiens
  misc_feature (1)...(330): n = A,T,C or G
gactgaggcccagtaataaagagaccaatgntttagctgctgcaaaggtgatngacaccaaatctgaagaagagcttgangattatatggntgagattgacatattancatcttgtgatcacccaaacatcgnnaagctnctagatgccttctattacgagaacaacctttggatcctcattgaattctgtgcagggggagcagtggatgcntgtgatgcttgaacttgagagaccattaactgaatcccaaatccaagtagtctgcaagcagacattagaggcattgaattacttacatgacaataaaatcatccaccgagatctaaaa

SEQ ID NO: 1554 - DNA, 495 bp, Homo sapiens
  misc_feature (1)...(495): n = A,T,C or G
tgggctgggcttcaccnggncagggccatanttncttcttgcggaactcncgaaggntggcnggaagngngggtgagcttnatatntctactgnntctaatcgatgnatctganctccggtncccgtnnnttgtattaccaaaacaangaacacttgngccgggccccgggagtcccagcgtctcggatagaacaaacctaaaggaaaacctaggcacctgaggtgcccccaaaagcgaatgccccccctccctcacctccccagccactgcctgtttatccccaactccaccgctcggctcagggtgggcggccaaggaaaccccggtattgcgcatgcgccacagcttctcggcgttcgtctatctagccggagaaaagagaagccaatcagaggggacttcggatcacgtgacagatgatgccacaccccaaggaatccaccgaccgtagaccgtgagtctacggtggctcagtaggccaatataggttcgt

SEQ ID NO: 1555 - DNA, 496 bp, Homo sapiens
  misc_feature (1)...(496): n = A,T,C or G
ttctcatttccagatcttcaagggactggcagcagaccagacggaggccctttttgttggggatgccatcctgtctgtgaatggtgaagatttgtcctctgccacccacgatgaagcggtacaggccctcaagaagacaggcaaggaggttgtgttggaggggagacatttttttggctgcacacatanaagtttggatcatgtgactcctcccagacaaaacttggcctaatctagcgctggcctgatctgcagaactccactgaaatgctcgtggttgttgccagtaacaaggttcagcaggtaaaacgctcgctcgntgccaaatctgatgactggagttcantctncagaagccacatgccggaggaaggggtctgaagtctccagaagccacatgccggaggaagggtctgattcttgcaagctgtncccaacctctgcacacgtgtgctgntcctatncataaacacattcatcttctctgactggtgcc

SEQ ID NO: 1556 - DNA, 541 bp, Homo sapiens
  misc_feature (1)...(541): n = A,T,C or G
gaaccgtgacgggcacttaacaactcctcgggttctccagttcaagctgacgtgtacttcccacgactgatagttccattnngtgggcacattaaaggtggcatgagaccaggcaagaaggtattatgtgatgggcatcgtagatctcaaccccgaaagctttgccatcagccttgacctgtggagactctgaagatcctcctgccgatgtggcaattgaactcaaagctgtgttcacagaccggcagctgctcagaaactcttgtatctcaggagaaagaggcgaggagcagtcggcaatcccttactttccattcatcccagaccagccgttcagggtggagattctttgcgagcacccacgtttcagagtgtttgtggatggacaccaactttttgatttttatcaccgtattcaaacattatntgcaattgacaccataaagatcaatggggacctccagatcaccaaacttggctgatgtttaaagcacttctatttcaaatatgatcgatcaggtgccacaactacatgtctgaa

SEQ ID NO: 1557 - DNA, 552 bp, Homo sapiens
gactgagtgtaaggagaagctggggtaagccgctgcccccacagtatgccctggagctgctcacagtgtacgcctgggaaagtgggagtagagactgcgaattcaacacagcccagggcttccgaactgtcttggaactggtcaccaagtacaagtggcttcgaatctactggacagtgtattatgactttagaaagacgaaggtctctgaatacctgcacaaaatgctccaaaaagtcaggcctgtgatcctggaccctgctgacccaacaaggaacgtggctggtaccaacctactaggctgggggctgttggcaaaagaagctgccatctggctgcagtcctcctgctttaggaactgtgatacgtgcctcgtgggcccctggggtgtgccgatgaaggtcgagattccacaggactgtgtccttctatgagcaccaaagcacctgccaggatgctcaagagtcagggatatgagatccttgctctgctgcaggcccttgaaccagagaagggggaaagctgctcacggccccaatcagggagggtcca

SEQ ID NO: 1558 - DNA, 346 bp, Homo sapiens
  misc_feature (1)...(346): n = A,T,C or G
tgaggggctcagccgttcccattatcgtttcttggtgcaggtccggcacccgtgtttgctgcagatagatcgaagtggcacattccgatgccgtcggggaaaggttattttaattttggaaagattcttttcagaaatactaccatcttactgaaatttgatggagagccttgtgaccagtctttaaatataaccgtggtttctgaaaagtgctgattgntacaatgaaatctacaatttcaaggcagatgaaatanagtcataccttggaaaatctcaagggaaaaaaaggcttgtctgggagataccatacatcatcaagantatttcacaacgtgtagtgaac

SEQ ID NO: 1559 - DNA, 142 bp, Homo sapiens
atgctgcagaagagatgcttcagcaggagctgctaagtcgcacatctctggagacccagaagttggatctgatgactgaggtgtctgagctgaagctcaagctggttggtatggaaaaagaacagaaagaacaagaaaaaaa

SEQ ID NO: 1560 - DNA, 350 bp, Homo sapiens
  misc_feature (1)...(350): n = A,T,C or G
ctccatcttcatgatgttccaatttatgcagacaaggatgtgttccacatggtggttgaggttccacgctggtccaacgccaaaatggagattgctacaaaggaccctttaaacccaatcaagcaagatgtgaaaaaggggaagctccgctatgtggcgaatctgttcccttataaagggtatatttggaactacggcgccatccctcagacatgggaagacccaggacacagggacaagcacactggctgctgtggtgacaacgacccaatccgatgnttgngaaatcggaagcaaggcgngtgccagaggnganataatcagggtgaaggtcctgggcatactggcca

SEQ ID NO: 1561 - DNA, 386 bp, Homo sapiens
  misc_feature (1)...(386): n = A,T,C or G
tgaaaagctggcagtgctccgggaactggaaaaagaactcctgtccgtggtgattgccgtcaagatgcagggttccaagcgtgtcttgagatcacatgagattgtgttgcnctcctagtggacaagtggaaactgacctggctctgaccttctctctccaggtaagtgggatacctggatagtgaggatttgagaaagtcagtgctttggatagnaaactctccttcccatggtgcccagggtgatgggcacactttgtncaataccctgnagatggcggactcatttnctccnaagtgccctgagagacaggtgtgccctgagtaccctgngngctggatgcctngtnagagccacntgaactctttcttactgggatctcctct

SEQ ID NO: 1562 - DNA, 327 bp, Homo sapiens
  misc_feature (1)...(327): n = A,T,C or G
tgtcatccgggatcagtttttggagagaagatcaaacttggataaactattgattattattcaaaatgaagacattgcaggtttcattcacaaggtgcctggcttagtgactttaaagaagctcccatgtgttagttttgctggtgttgatagcctggatgatgttaaaaatcatacatacaacgagttatttgtatctggnggctttattgngtctgatgaatcaattctaaatctagaggttgtcacaattggcaagaatgagtacattatttttantacgtgatttcttgggtgtggtcgccctanattttcatggaaaattaa

SEQ ID NO: 1563 - DNA, 443 bp, Homo sapiens
  misc_feature (1)...(443): n = A,T,C or G
aaaggaggcaagccttccccgccctctggaaagagcgccaaacggaaaatggaaggcccaaagaaagcccagggccacagccctgtaaatggcttgctgaaagggcaggagagtcgaagtcaaagcaggagtcgtgagcagagctactcaaggtccccatcacggtctgcttctccaaagagaaggaanagtgatagtggctctacctcangtgggtccaagtcacagagtcgttctcggagccgaagtgactctnctccaaggcaggtacaccgaggtgctccctacaaaggctcanaagtgaggggctcccggaaatnaaaggactgctngtacctcacccagaagccacacaagtnttcgtagccggagctcctctcgttcccnaagccggtcacgagagcngacggncaattctggaaaatacaacaagaaaagtcatt

SEQ ID NO: 1564 - DNA, 206 bp, Homo sapiens
  misc_feature (1)...(206): n = A,T,C or G
ggctcacccctggaggcaggaccccccgcagaggctacgttggnaggcntcacctggagntcacccataaccatgacgngggggatctcancatgggacaagattgcagtctccctccccngctctgagaaactncgnnccctagtngctggcntggcatncccacatggcatgaggccacagttgtggatgcgggtctttggggc

SEQ ID NO: 1565 - DNA, 514 bp, Homo sapiens
  misc_feature (1)...(514): n = A,T,C or G
ctgaggtgctgctttaaggtgaaacgatttcagtggatggaaataaggctaaacttgcaatatgggatacagctggtcaagagaggttcagaacattaactcccagctattatagaggtgcacagggagttatattagnctatgatgtcacaagaagagacaccttngttaaacatggatancntgggtaaatganttggaaacntacatgnacaagaaatgacatagtaaacatgctagtnggaaataaaattgataaggaaaaccgtgangtcnatacaantgaaggcttgaaatttgcacncaagcattctatgttgttcatagaggcangtgcaaaancctgtgatggggtncagcgtgcctttgnggagnttgntganaagatnattnanacncctgncctgtgggaaagtgagaaccagaacaangganncangctgtctcncagggaatatagccgcggaggaggcgcctgcnncggntactgatctgggctataaactctgggaat

SEQ ID NO: 1566 - DNA, 518 bp, Homo sapiens
tgagtacacacagcttgaacccaccatggatgacagtgacgtccacatgagctccctgaggtccgtgtgcttctcacctgaaggcttgtatctcgctacggtggcagatgacaggctgctcaggatctgggctctggaactgaaggctccggttgcctttgctccgatgaccaatggtctttgctgcacgttcttcccacacggtggaattattgccacagggacgagagatggccatgtccagttctggacagctccccgggtcctgtcctcactgaagcacttatgcaggaaagccctccgaagtttcctgacaacgtatcaagtcctagcactgccaatccccaagaagatgaaagagttcctcacgtacaggactttctagcagtgccggctcccccacctcctgcagcagcagcagtacaagggactggctaggatggagtcaggcagctcacactggaccagtgtggaccttccttcctcccatggcatgtgcaagtaggtctgcgtgaccc

SEQ ID NO: 1567 - DNA, 484 bp, Homo sapiens
ttggtgatggagtacctgcccagcggctgcctgcgagacttcctgcagcgccatcgcgcgcgcctgcacaccgaccgcctactgctgttcgcttggcagatctgcaagggcatggagtacctgggtgctgctgccgctgcgtacaccgtgacctggctgcgcgcaacatcttggtggagagcgaggctcatgtgaagatcgcggacttcggcctcgctaagctgctgcccctgggaaaggactactacgtggtccgcgagcctggccaaagccccatcttttggtatgccccggagtccctatctgacaacatcttctcccgccaatctgacgtgtggagcttcggagtggtgttgtacgagctcttcacctactgcgacaagagctgcagcccatccgctgagttcctgcgcatgatggggcctgagcgtgaaggacccccgctctgccgcctcctggagctgctggcagagggccgacgcag

SEQ ID NO: 1568 - DNA, 238 bp, Homo sapiens
  misc_feature (1)...(238): n = A,T,C or G
ccccgtgcgttgttatcaaagaaatnnggnggatgaagggttctacttcactcccaagggagatgacccatgcttgagctgtacctgccatcgaggggagcctgagatgtgtgttgctgncctgtgtgagcggccccaggggtgacagcagnaccgcaaggaccctaaggantgctcgcaaanttcatgtgtctggacccaggtgagatanccaccccttgggcaaaagctgtgatga

SEQ ID NO: 1569 - DNA, 448 bp, Homo sapiens
  misc_feature (1)...(448): n = A,T,C or G
atccgattcgtgtcccgggnnccatgaagcttcacaatctgatctctaaattgaaaaagtggatcaaaatcctcgaggctaaaaccaagcagcttcccaagttcttcctcatagaagaaaaatgtcggttcttgagcaatttctcagctcagacagctgaagtggagatccctggagagtttttgatgcctaagccaacacattactatatcaagatcgctcggtgagcacacagggcctagcagtgcagagggcggactttgggttggccttggcgcgctgcctctgctggtccctcggtatgaggtacctgtacagctctgtcgttggttttgtccaggacctgacattgtcagaaggccaggcttgtttgcagaaaccttctgagagtcactgtggaactggacaagctgagcgctgccatgttgattaaactcttagcatgcag

SEQ ID NO: 1570 - DNA, 556 bp, Homo sapiens
actgagctgccgactacaggtccattctgagcattagtgacgaggcagccagggtgcaggccctggaccaacacctcagcacgcgtagctatatccaggggtactccctatcccaggcagatgtggacgtgttcaggcagctctcggcccctcccgctgactcaaggctcttccacgtggctcggtggttcaggcacatagaagcgctcctgggtggcccccaaggcagagacgagccctgcaggcttcaagcaagtgagtaacagcagtgaacctctgcttcaaggtcaagggcatgaggtgctacagggcagtggatatcctgctggagactcacctccatatttcagtcaagtgttcctgtggggcagaagccatgcttgttgggtctggtaggataaagtcatgtaaccaacatgtagctcagcgccacctttgggaccacttcagggccatactagatgctgttacagacctgtcttggggttccactaatgctttgatgggagtggctcttggttcttgtctttagtcccataggttacatttgtttggg

SEQ ID NO: 1571 - DNA, 283 bp, Homo sapiens
gactgaggctgaagacctgaacgtcaagttggaaggggagccttccatgcggaaaccaaagcagcggccgcggccggagcccctcatcatccccaccaaggcgggcactttcatcgcccctcctgtctactccaacatcaccccttaccagagccacctgcgctctcccgtgcgccttgctgaccacccctctgagcggagctttgagccccccccttacacaccaccccccattctcagccccgtccgggaaggctctggcctctacttattaaaaaaaaaa

SEQ ID NO: 1572 - DNA, 538 bp, Homo sapiens
tgaggctggaatgactgcccttatggaagtcgctgggggagagcagcagcacagtacagttcccagaagtcagtggaggagagatcctggaggcagcctctgaggagacttgagatttccccagatagcagcccggagagagcccactatgggcacagcgaataccagtatgcctggcggagccacgtggtgcctggtgggcgcctcaccctgccacgctatgctcgctcagagatcctgggcctacgccaggctggcacagcccgcaggccacctgggtgcgggtcattcagcgatgctgtcttcgacaatggcccactcaagcccacaatgcccacccaccctcctggcaccagccacagtgcgggcagcttgttggaagagaccactgtgcgcgtgagccaggctcggcttcaaagcacgcagagcagaaccgcccgctcctcctggcccaggagctcagtccgcagtagcctgcgggagccaggaagaatgctgaccaccgcaggccaggctgccgtgggcagcggggatgcac

SEQ ID NO: 1573 - DNA, 385 bp, Homo sapiens
  misc_feature (1)...(385): n = A,T,C or G
agctggcgcttctgaacagatacgaggaccaattagatgagagcatgatccagngtttaccttgctgagctgattttggctgtccacagcgtgcaccagatgggatatgtgcatcgagacatcaagcccgagaacatccttatcgaccggacgggacacatcaagctggtggattttgnatcagccgctangatgaattnaaataagggggatgccaaactccccattgggaccccggattacatggctccggaagtgttgaccgtgatgaacgaggaccgaaggggcacatacggtntggactgtgactggtggtctgtcggagttgntgcttatganatggtttnatggnaagaccncatttcacagagggaacctccgcccg

SEQ ID NO: 1574 - DNA, 527 bp, Homo sapiens
  misc_feature (1)...(527): n = A,T,C or G
cgactgtttatgagtgcttatctgaatggggccagatcctctgcgccgtttgccccaaccccaagcttgtcatcacaggcggaacaagcacagtggtgtgtgtctgggagatgggcacctccaaagaaaaggccaagcccctcacgctcaagcaggctctccttggccacactgatactgtcacctgtgccacagcatccctggcctaccacataattgtcagcgggtcccgggaccgaacctgcatcatctgggacctgaacaaactgtcattcctaacccagctccgcggccaccgagctcccgtctccgctctttgcattaatgagctaacaggggacattgtgtcctgcgcaggcacgtacatccacgtgtggagcatcaatgggaatcccatcgtgagtgtgaacacattcacgggccggagccagcagattgtctgctgctgcatgtccgagatgaacgagtgggacacgcagaatgtcatcgngacaggacactcagatggagtggtccggttctggaga

SEQ ID NO: 1575 - DNA, 393 bp, Homo sapiens
  misc_feature (1)...(393): n = A,T,C or G
gtatgatgatgtagttaagattgtgaatctagcttgcaatataacctttgtatcataccaattggtggaggaacaagtgtgtcctatggcttgatgtgtcctgcagacgagacaagaacaataatttctttgggacacttcacaaaatgaacccggatttctctggggttgatgagaacantctggacagtttcacggtnaaggcttggggataacnnggccaaggattttggaaanaanncnttaaaaaaaangnggttttttntannggtantaaaacccggnnttccttggaatnaaccccccgnggggnaggnngggattttttttttngggnngtggggnttngaaaaaaaantttttttttggccatntttggggccccccgggggg

SEQ ID NO: 1576 - DNA, 540 bp, Homo sapiens
  misc_feature (1)...(540): n = A,T,C or G
ggcgtttgaagaggttttccagaatgccaacttccggtcatttacgttcagaatcagggtcaagctggagacctacaatgatgaatctcgaattaaggccactgtgatggacgtgaagcccgtggacttcagagactatggcagacggctgatcgcgaacatcaggaagaacatgtgatgggagcaagtaccactggtggccagaacggaagagagaagaacagaaatagaatggcttccttcccgccccatgggacagctccacaatgaagatcctctaggggaggctggcaacccatctgggcccctcttgggactcactgataagcaaagacagtgagctcagagggctgtgtgtgaaccttccgctccagttctcagccaccggtagtgtggcagcagtcccctcctcctgccttccggctttgtcggatttcatgaaattttgttatcttcaaacagaaattntgtcacaagtcattaaccccactctggataatgaggcaaattatgtaacctggagtgtgcttttccagtgcg

SEQ ID NO: 1577 - DNA, 486 bp, Homo sapiens
gactgagggaaaatgctcaacatccacccatccttgctcccttcctttaagggttcaaatgcccacgagcaagtcctggaagctggagtcacaatcacctgggtgtacccgtacacctttgtcgctgaagatgtagatgccggacaaatcatcctgcaggaagctgtccctgtgccggaggggtgacacctgtggcaacgcctgtctgaacgggtcaaagtggcagaacataagatctttcctgccgctcttcagctggtggccagcggggctgtgcagctgcgagaagatggcaagatccactgggccaaggagcagtgaccggtcctgatgcaggagtgggctcagtgctgagagagaggcagggccttgctgggtgccttttcatcatgaccatggccaaactgaaatacctgctggcaaaaagactttaatccttacccgctgccattttttaaataaataggttcattgaaaagaaaaaaa

SEQ ID NO: 1578 - DNA, 548 bp, Homo sapiens
  misc_feature (1)...(548): n = A,T,C or G
actgagctcctgtcccctgaggactaccagcgtttcctggatctgggtgtgtccatcgcagagaaccgaagcaccttgagctaccactgcaagacccccgactgcaggggttggtgcttctttgaggatgatgtcaacgagttcacctgtcctgtgtgcacccgtgtcaacatgcctgctctgcaaggccatccatgagcacatgaattgcagggagtaccaagacgacctggccctgcgggctcagaatgatgtggctgcccggcagacgacagagatgctaaaggtaatgctgcagcagggcgaggccatgcactgcccacagtgccggattgtggtgcagaagaaggacggctgtgactggatccgctgtacagtctgccacactgagatctgctgggtcaccaagggcccacgctggggcccagggggcccaggggacaccagtggtggctgccgctgccgggtcaatgggattccatgccacccaagctgtcaaaactgccactaagtcgacgatggnggctctcatactgacccagccccgc

SEQ ID NO: 1579 - DNA, 371 bp, Homo sapiens
  misc_feature (1)...(371): n = A,T,C or G
gcacccctgggccctttttgtggncattaccctctctcagctgccaaccatcatcgaagagggtnctgccttcaggcacagcccattctttgccgagcagctgacagcattccaggtgtggctcacaatgggtgtggaaaacaggagccccccagagcagctgcccatcgtcctgcaggtcagtcgcttcccacagacctaactgagacacctgttcctcaggaggcgagccgggctgtgcttcaggccaacggtacatcgatgtgttacatctgatctgaagtcagatgcttgcttactcccagcggnctcctcttggcaaagncactgaattccctttttcctctcccaattaaatatagattgggata

SEQ ID NO: 1580 - DNA, 538 bp, Homo sapiens
  misc_feature (1)...(538): n = A,T,C or G
gatctgagcctacggagagccttcctgagtcacccagcagntccaggtcacaaagaagaatcacaccttctcaaacagagagtgggacatccctaggcttcctggagaggacgagggagctcccanaagaagggactgtgcacacgcaagtggntggcacctgggtgtcccgccaagcctcccaccctgctctggaacctggggagccaactgtgctctcccanaagagaaattcatccggccaggaacactccgggccaccattctcctggagtcagagtcaccctcctccctcagaccacccatcgtgttctggatgtattannaanggtaanaattncaccgctctacaaancccatnagtcacccagacaaagagcatgcttatcantgacacatacnntnagggagctccaagaactctgcggtgctctgnccgntggtgtggaccctgnagatgacacagagggnttccntgatcactncanacttggtataacttcantgncantccgntcttcaccctctgtgaaggact

SEQ ID NO: 1581 - DNA, 501 bp, Homo sapiens
  misc_feature (1)...(501): n = A,T,C or G
actgagcccctcccagtcccaaacacagnctaaccttgtgggccagacagaaggcagcgatgcccacaggccaaaaacaacacagcacagagaataccgccaggccgaggtggtcatggggaagaagtggagagagccggtcgcccccatcatcatctgagtcacgtgtcacgtggataatgtgtcctgcagataggagagagcacaggtggtggtcctcacccacctccccatcgcccccgtagaccagtgcttccctggggccttcccagagacttttctgtcccctagatcccttgaaggggcgacagtggcctgactgagggtctccagagagacccacccccaggtgagttcattctcaagggtccaactatgggaagattgctcataatccctgagtgaagacatctgcagtgggggcaggctttgccttgggatgagaacctgtaaagagttaaaagtgctcccgtggtctgaattgttaggacaaaaaaaaaa

SEQ ID NO: 1582 - DNA, 296 bp, Homo sapiens
tccctctgaggaagagctgttgtcccagcccggagatttttcagaagaagctgaggattctcagtgttgtagtttgaaacttctgggtgaggaagaaggctatgaagcggatagtgaaagcaatcctgaggatgttgacacccaagacgatggagtagaattaaatcctgaagcagaaggtttcagtggatcgattgtttcaaacaacttacttgaaaacctcactcacggggaaataatataccctgagatttgcatgctgggattaaatttgctttctgctagcaaaaaaaaaa

SEQ ID NO: 1583 - DNA, 548 bp, Homo sapiens
gactgaggtagccaatgagactcatggtcatgttggtgctgatttggcagccctatgttcagaggctgctctgcaggccatccggaaaaaaatggacctcattgacctagaagatgagaccattgatgctgaggtcatgaattccctggcagttactatggatgacttccggtgggcctttgagtcaaagcaacccatcagcacttcgggaaactgtggtagaggtgccacaagtaacctgggaagatattggaggcctggaggatgtcaaacgtgagcttcaggagttggttcagtatcctgtggaacatccagacaaattcctcaaatttggcatgactccctccaaaggcgttcttttctatggacctcctggctgtgggaaaaccttactggctaaagccattgctaatgaatgccaggccaacttcatctccatcaagggtcctgagctgcttaccatgtggtttggggaatctgaggccaatgtccgggaaatttttgacaaggcacggcaagctgccccctgtgtactcttctttgatgag

SEQ ID NO: 1584 - DNA, 444 bp, Homo sapiens
  misc_feature (1)...(444): n = A,T,C or G
gactgaggaagcaatgaagttacagcaagncatgangaaaaagaaacaagantgttgganaagcacatagaatgccagaagatgctgatttctaaactatgnangaacntgaacatgaanccngangananngctggtataatgaagaccttgaaagaactgggagagaagatntcacaattgaaagatgaattaaaaacatcttctacagtctccacaccgnccaaagnaaagacaaaaacagaggcccagaaggagttgttggacacagagttggacctccacaagaggctctcttcaggagaagatacaacagaattacgtaaaaagctcagtcagttacaagttgaggctgcaagattaggtattttacctgnggggagaggaaagaccatatnctntcaaggccgaggaagaggcangggtcnaggaagagggaggggc

SEQ ID NO: 1585 - DNA, 405 bp, Homo sapiens
  misc_feature (1)...(405): n = A,T,C or G
tgtatccccctggcagcatttggcaatgcgaanacagtatacaacaacaactccagtcgcttcgggaagtttgttcagctgaacatctgccagcagggaaacattcagggaggaagaattgtagattgtatcctgtttcgtttcatggctggctttgtatttggccctgacagtgagaactttgttctcttactgtaaggggcccaaaagaacgtgaaatacttgtttctctagctcangggttcttttctctttaatatcattgcatctggcctgttagttactttacaaggtaaatgatcatttttcctttggaaatgtctcagattatgcccatagtctagattnatcgnttattatctgatnctctgtngctataatgtgatgtctgacgggatacttgat

SEQ ID NO: 1586 - DNA, 476 bp, Homo sapiens
  misc_feature (1)...(476): n = A,T,C or G
ccacaaaattaaaatnggcattgcgaattgccaaggaatgtatagagaagagactcaccgaggaacagaagcagattcaccagcatcgaagactaacgagagcccagtcacaccatgggtctgaggaagaaaggaaaaggagaaagatcttagctcgaaagaagtcaaaacgatctgctgttgaaaacagtgaggagcagccagtgaagcacagtaactccaataactcagcaggatctggggccagntcacctntcacatccccatcatctccaactccaccctccacagnaggntagtaattggtaacctctctntctatnancgntgntggtgnaccttgctctngnatcaagcattttagggnntagaccccanctgtcttctcnnagggtcctntgcanntnanangtgtnatctacaggnttgatttccaagctcaccactnangnnaaggctgctttgaggaccactgc

SEQ ID NO: 1587 - DNA, 429 bp, Homo sapiens
tccagatctcggtctcgttcgttttcaaagtctcggtcccgaagccgatctgtctctcgttcaaggaagcgcaggctgagttctaggtctcgttccagatcatattctccagctcataacagagaaaggaatcaccccagagtgtatcagaatcgagatttccgaggtcataacagaggctacaggaggccctattacttccgtgggcgaaaccgaggcttttatccatggggccagtataaccgaggtggctatggaaactaccgttccaattggcagaactaccggcaagcatacagccctcgtcggggccgttctcgatcccggtccccaaagagaaggtccccttcaccacggtccaggagccattctaggaactctgacaagtcatcctctgacaggtcaagacgctcctcatcctcccggttg

SEQ ID NO: 1588 - DNA, 136 bp, Homo sapiens
ccgagtcgtgacgtgctctttattggcactgaagagattgctttgtttcttacctaacaatgagcttgattctctggaggagaaatttaaatcactttttatcacagaataaattttggaagtatggaaaacacag

SEQ ID NO: 1589 - DNA, 492 bp, Homo sapiens
  misc_feature (1)...(492): n = A,T,C or G
cttccttttggtagtactgcgtgatgtggttttggcttatcctgaagtccgtattgttcttatgtctgcaactattgataccaccatgttctgtgaatatttcttcaattgccccatcattgaggtttatggaaggactttcccagttcaagagtattttctggaagactgcattcagatgactcaattcattcctcctccaaaggacaagaaaaagaaggataaggaggatgatggtggtgaagatgatgatgcaaattgcaacctaatatgtggtgacnaatatgggccagaaacaaagttgagcatgtctcagttgaatgaaaaggaaactccttttgaacttattgaggcgcttcttanatacattgaaacccttaatgnacctggagctgngttgngattnttaccctggctggaacttgattnatactatgcaaaagcatttagaaaataagttcgcatntncnggtgtgagtacttttttttttt

SEQ ID NO: 1590 - DNA, 384 bp, Homo sapiens
  misc_feature (1)...(384): n = A,T,C or G
gaactgaggtaatagaaacctaacactgttntgggangaatttaaatatcagcatagcaaagacacagacagctctttggaatctctccaatggctgaagaagacaagccatgggtatcccattcatcctacaatgcgatctttgnctcaaatggagagtnctgccttcctcttncaattaccaggaaaaaggattaccctgacctatggatttgtgccagtaatcccaacaacctggaaaacagctgnaaccagatagagcgcctgccttctatcccactggnnaccgtgaacagaagaccaccatcaaaagatgagagagagaggcaacttcaagagtcagtccagagatatcaggacaagctggtggaagcgcagccgcag

SEQ ID NO: 1591 - DNA, 379 bp, Homo sapiens
  misc_feature (1)...(379): n = A,T,C or G
aactgagctctgttttatggaagccagncattgtctgtcagctgctaatgttatttttggtcaaactggaaaaataccagctacagaagacactcctgaagttgaaggagacgtgccagagctttaccatcagaggaaaggggaaatagcaagatgctggatcaagtactgcctgactctgatgcaaaacgcgcagctctccatgcaggtgcatgggataatgagtgngcaccacaactggtaaggaccatacagaacaccacctnattntggaaccctttcctcagctaggctgtcaggactatggaggatggggtcagcatcaaatcccggntgncacatgattgtcccagtaaatagtggttatttttaaaaacat

SEQ ID NO: 1592 - DNA, 502 bp, Homo sapiens
  misc_feature (1)...(502): n = A,T,C or G
caatctgaaacggcagcttctgaggaaccctgaccaacgcctcccagcgcatcagcaagcttgagaggaacgtggaagagcttaagcgtaaagctgcccagaactctggggaggcagaatatatcgaaaaagtagtatattctgtaaaacagaatgcagacgatgttaagaagactctagatggcngaacnttgatgaaaagtataagaaggtagaaagtttaattgcccaaaaaactgaagagtcagcagatgccaggaggaaagctgagctgctacaaaatgaagcaaaaacactcttggctcaagctaacagcaagctccagctgttggaagacttagaaagaaaatatgaggacaatcaaaaatacttagaagataaagctcaagaattggtgcgactggaaggagaggttcgctccctccttaaggacataagtgagaaagttgcggtttacagcacctgcttataacaggaaggggctgtagaggggctcggtgat

SEQ ID NO: 1593 - DNA, 112 bp, Homo sapiens
  misc_feature (1)...(112): n = A,T,C or G
ggaccaacagaagactctggccctgaagagnaccacnagcaagcttggacggatgggaggcagtccanagagtccgagacacccaccaagaatgngaagcgaagacatgccg

SEQ ID NO: 1594 - DNA, 150 bp, Homo sapiens
  misc_feature (1)...(150): n = A,T,C or G
catgttccaggcagccccagccncgaaaataatcgaagatggcaaganccanacaatggaacacatgatcagccccattgcggggcancctgaccccgncactgctgttgncgttgcaggcgctgnaggcgctgctgccgtcattcctgt

SEQ ID NO: 1595 - DNA, 273 bp, Homo sapiens
gaggaaggagatgattacgaagtccttcctaacagcaacttctatgtatccagaaccgcctacagagatagcacttctgtctaccacataagtgggaagaagaagacgtttaaagatgttggaaatctccttagaagccatggcattgacttagaccataatcgatttttaatcttgcaggttgaagagctgaaaagtgtaccctgccaagagtaagactgtcataaatgagacaacaactagaaacaattcgcttgagaaagaaagagagaa

SEQ ID NO: 1596 - DNA, 289 bp, Homo sapiens
  misc_feature (1)...(289): n = A,T,C or G
cgggagttggctgcagaaatggcagcagctttcctcaatgaaaacctcccagaatccatttttggagctcccaaggctggcaatgggcagngggcctctgtgattcgggtgatgaaccctatccaggggaatacactanaccttgtccagttggagcaaaacgaggcagcctttagtgtggcagtgtggaggttctccaacactggggaagattggtatgtgctggngggtgttgccaaggacttgatacntgagccctcgatctgtggcagggggctttgggtatacg

SEQ ID NO: 1597 - DNA, 456 bp, Homo sapiens
  misc_feature (1)...(456): n = A,T,C or G
gaagatatggtgaatttagtcaccatgacctggctccatccctagacactggcactactgaggaggacctgcctgaagattgatgtgatcgactggctcgtgtttgacccggcacagagagcggaagccctgaggcaaggcaacgccatcatgaggaagttcttagcattaaagaaacatgaagctgcaaaagaagtgtttgtgaaaattcctcaggattccatcgcagagatctataatcagtgggaggagcaaggcatggagagccctcttnctgccgaggatgataacgccatccgagagcatttgtgtatcagagcctatctggaagcccatgaaaccttcaacgaatggtttaaacatatgaattcggctccacagaaacctacattactatctcaagcaactttttacagagaaagtgggcttatgaacacagagaataagaaatactaa

SEQ ID NO: 1598 - DNA, 473 bp, Homo sapiens
  misc_feature (1)...(473): n = A,T,C or G
tgttgttgcgctccagtgcagcatattgaaacatttatctgctaagcagatgccttcgccttgggactctgaacagacagagaaggctgatattaagcctgttattgtgactgacagctcaatcaccacctccctgcaaaccgctgacaaggcacctcttccttcccactaccctttgtcctgcccctcagcagtgagcacccaaaattccctgggctgctctccaccccaccaacccccaancctagaanacatcagctgcagtncttgtgtggangagcccaagaaagccccttgtgggactgccaatgggccggtgaacacagagatnnnagccanagnanccacacctctacagnggccccactgattccacggatncccggcganattcctggcgccaacacccctttacnaggccntaacacacnngnccaaggcctggccccggccccttcacgccaccatgcggc

SEQ ID NO: 1599 - DNA, 389 bp, Homo sapiens
  misc_feature (1)...(389): n = A,T,C or G
ttgttcggagaaattacagangagtggagaggtgccgccacagaaacttcaggctttgcaaagagtccttcagagtgagttctgcaatgctgtaagagaggnatacnancatgtttatgagacggcggacatcancagcagccntgaagtgagagccaatgcaacttgnaaaggctacngttgctgcatnngctgccagngaaggacactctcatccncgagttgtngagctaccnaaaacagancagggccttggattcaatattatgggangcaaagagcaaaactcacacantctatatatngcggataattccaggtgganttcgntgccnnaccngggggtctcaaacgagganatnanctacttttcccgccaccggcagccg

SEQ ID NO: 1600 - DNA, 519 bp, Homo sapiens
  misc_feature (1)...(519): n = A,T,C or G
caattccaaaagaatttccatctttctaagcatgcaagatgaagttgagacggaagtaatcatcaaggacattttcaaacaaggcaaaatctgcttcatccctctggtaccaattccagagcaatcacatggacatggngaggntaacgncacctgaagaaattgctttacttcccaagacatcttggaatattcatcancctggtgagggagatgttcgggaggaggccttatccactggtggacttgacctcatcttccttcctggcctcgggtttgacaaagatggcaaccggntggggcggggtaaggggtactatgacacctacctgaagcgctgtgtacagcatcaggaagtgaagccctacaccatggctttggcttttaaagagcagatctgtccccagatcccagtggatgagcatgacatgaaggtagatgaagtcctttatgaagattccccagcatcctaagttacaccacgacggctacacttactgctctgtcccggtgtaaaga

SEQ ID NO: 1601 - DNA, 429 bp, Homo sapiens
  misc_feature (1)...(429): n = A,T,C or G
gctgtggcccactcaacagcacagcgtgggctgaggagccgctgtgccggaacctgcgcctggggctgtgggtcctctcgctgctctacctgggggcaggggtccctgtgagcttaggctataatgctcttctggtgctggccaacctggccagcaagaacaccatgaccatgcccgacgngtacttcgtgaacatggccgnggcggngctggtgctcacggcactggcacctgcgtacctgntggnccctgcccactccaggtgggccctgtggagcctcatcagtgaggcccatgngacactgcctcatcctgtncaangtggcnttncctggngaccatgtnctaccactgcactgntnagccttgactactactatccagcgtgcccctgccacacaccntacatggncagtgtgtacaacaccc

SEQ ID NO: 1602 - DNA, 331 bp, Homo sapiens
  misc_feature (1)...(331): n = A,T,C or G
ccattctgtgaattgnggaggtctccgtncncggntctgggggttnanaggnctnanaagcctcctcatgactgnaggggtccagcacaggcgttgtgnnntctgtaactgcggngagcccgncctgnatggncagagggagcttgcancgctttgagttgncatctgacnggcccgggtntnnagtggtaccctctgggggaaactcagnncccttgtgaggcagngntgcccaaggaggacgcatcacaaattgntttcnctgagggncttacntctgccccacctncgagagcctgtagggcactgctggncacatcgattgttgtgc

SEQ ID NO: 1603 - DNA, 212 bp, Homo sapiens
  misc_feature (1)...(212): n = A,T,C or G
ggttaagtcacccaccctgtncacccccaggatgagtcacccacctctccggaactcctgctgccggtcttnnttnatccagatcaatgatgacgggacgagagcgtttcttggttttcttcggcctacttgaggctnnggactncntcacngtgagtnntctgtacatctcataccccatcancagcactncatcctctgaaaccctatca

SEQ ID NO: 1604 - DNA, 235 bp, Homo sapiens
caacagcagcacaaaatgaacatcatcctttggaaggcatcacaataaggcacaaacctcggcgctgcctctgtggctctaaggcgaccaccttcagaagttgacctgtggggaatgtggctgtcctaccaagtgtaagaggaaatataacaggagcgccaaggccaagagaccaaacactactggggactgggcggtcaggaacataaatttgtctgtcacagaataaaaaaaa

SEQ ID NO: 1605 - DNA, 422 bp, Homo sapiens
  misc_feature (1)...(422): n = A,T,C or G
tctctactgcagccaaggaaanggtcgaggagcacatgtggagactccgaagtggaggaggagtccccgggaaagcgcctggacacaggttttcagntaaccactaatgtgcctgggtagctcactctttggatcctaatccttttctcttaacctcgacttggactggagttctgctaaatggcctcttggaatgcaaagccttcgctgcctccttaccttctcctagttcttgaggaccacattggaatcacntgctgagccatcctntanacagacacctacctaaccttgaaggagatctgtcctgggccagcgtacccctctctcagcccagcagntcganaggagcnctggtgcctgancanatgtctctcggtgcctncgttttgctggagctatagcagagcctgctgcagcct

SEQ ID NO: 1606 - DNA, 255 bp, Homo sapiens
  misc_feature (1)...(255): n = A,T,C or G
tggcggtttggatctacaccctcccacatctccaaacggccagtgttcttgtttgaggagcccccctaatcctacccaactggaaaccacacataccaggagattgcggtgccacctncggtcccaccaccaccgtccagcgaggccctcaatggcacggtcctggaccctttagatcagtggtagcctagtggttccagatacgctcaccancagcctccgtccccantgcccgtgtacagctccagtgctaaa

SEQ ID NO: 1607 - DNA, 496 bp, Homo sapiens
  misc_feature (1)...(496): n = A,T,C or G
tgtgggccctgtatctccagcactccaaccgaatctgtgtcatcacactggcaggatcccatccagttcttcaaagtggcaaagccattcaaaggatttcctatcagatcagtaacaattgcagcagacttgagaacaaagtatctgggaaatttaagctggggggcacagtttctaacagagcttgcacctctgtgtaagatatacntgctctgatggagaggaatataccatatctagctgtgttagaggtcgattgatggaggtgaatgaaaacattcttcatcagccatctcttcttcaagaaaagccgtccactgaaggctacattgcagttgtattacccaaatttgaagaaagtaaaagcgtaacagaagggttgctgacacagcaacagtatgaagaggttgtggtaaaacgcactaatgccacagccaccacgccctgagtctttcgatggaggcagcactggattctcagcctacccgcggccaga

SEQ ID NO: 1608 - DNA, 280 bp, Homo sapiens; identical to SEQ ID NO: 56
  misc_feature (1)...(280): n = A,T,C or G

SEQ ID NO: 1609 - DNA, 303 bp, Homo sapiens; identical to SEQ ID NO: 57
  misc_feature (1)...(303): n = A,T,C or G

SEQ ID NO: 1610 - DNA, 497 bp, Homo sapiens
  misc_feature (1)...(497): n = A,T,C or G
ttgaggtgcggtctttcaaggccatctgggtccgatcgcggagggccaggatgggggaggcggccgtggcagagggaccttgtccactgctggaggacagcttcacgcgcttctcgtcgcaaagcaacagtgtacgggcttgctggaggcgcggacngggcngaggggagttgctggccgccactcttaaaggcaaggtgctcggcttccgctatcaagacctccgacagaaaatccggcctgtggctaaagagctgcaattcaactacattcccgtggatgctgagatcgtctccatcgacactttcaacaagtcacccccaaaacggggcctggttgtgggcatcacttttataaaggactcaggagacaagggcagtccgtttcttaacatttactgtgactatgagcctggctcagagtacaacctggactctattgcagagagctgcctgaatttggaactccagttcacacctttccagctgtgccacgca

SEQ ID NO: 1611 - DNA, 305 bp, Homo sapiens
  misc_feature (1)...(305): n = A,T,C or G
ggagctttgagtcctggcgtgagcacattagggatttncagcanccaaggagagcagagcaanccagctcannctccctttnctcctcacacctcccctccccgngtgtgtgtgagtgtgnggagaactnagaaactgactgttgccctttatttatgcnaaaccacctcanaatccaanccaccctgtgctgcccagcttctcccttgggaaagcctctcctgttctctctncttcccaccctnactccntcacacntttgtgatccccattctnacctgcttccctcaggaccccaccctatt

SEQ ID NO: 1612 - DNA, 432 bp, Homo sapiens
  misc_feature (1)...(432): n = A,T,C or G
gagaggcctggaatgctaagatncagacctgaagcagaaagtggagaacctcttcaatgaaaagtgcggggaagcgcttggccttaagcaggctgtgaaagtcccgtttgcgttgttcgagtccttcccagaagacttctatgtggaaggcttgcccgagggggtgcccttccgaaggccgtccacatttggcattcccaggctggagaagatactccggaacaaggccaagataaagttcatcattaaaaaacctgagatgntcnagacggccatcaaagagagcacctcttccaaaagccctccaagaaagataaactcatcacccaacgntaatactactgcntcangtgtggaagacctgancatcatccaggtnacaattccagatgacgatanngaacgactgnccaaagttgaaaaggccaggca

SEQ ID NO: 1613 - DNA, 396 bp, Homo sapiens
  misc_feature (1)...(396): n = A,T,C or G
atttggggacgttggtaccgggtacgtatacctatacccctcatggattacatccttaatgtgatgaaatttgtggaatctattttgagcaacaatacaacagatgaccactgtcaagaatttgtaaaccagaaaggactcttacctttggttaccattttgggtcttcccaatctgcccattgactttcccacatctgctgcctgtcaggctgntgcaggtgtctgcaaatccatattggtgtaaagcgctttcataagagaacatggggaaaggactgatctaactaccccacctctaanatgctctgtgaggagggatagatttattttcaagccataggaaggcaaanaatttctanctttgcaataacaangtgngcaatctttaattgcc

SEQ ID NO: 1614 - DNA, 423 bp, Homo sapiens
  misc_feature (1)...(423): n = A,T,C or G
ttgttcggacacttgacaggnngtttttcgggttcnacctcttggtatgaagagtctgaaactagtcatccantcaacaggaggtggngagagctatctcccggtttcccatacctgttttaatcttctagatctcccaaaatatacagagaaagaaaccctccgatgtaaactgatccaagctattgatcacaatgaaggcttcagtttaatatgaccttggacttttntntttngtacaaaaaccactcgtgtttctcttgtgaattcagcacagtgagagttacttctgtaattcttacttataaattgttcactactgtactgatgaaagcccaaaattaaaaactgtgcattaatactaaactgtacagaaccatgaattgtccatcctcatacaagtantgtgaatacattaaagtt

SEQ ID NO: 1615 - DNA, 274 bp, Homo sapiens
  misc_feature (1)...(274): n = A,T,C or G
tgagttgatatgaacacagatcaagnattagagaaatctttgcaaaaagaaaggcttgaacacaagaaagcaaaggaagatttccttgtttataagttagaagcacaagaaacacttaacaaaggaagggtaaggctttgttctgttttggcttttattttgttctcatgaactttaagggagataaaaataccactgcaaaaaattttactccatttattaccagcataaatggattaagggtggacatacatttttgttaccaaaaaaaaaa

SEQ ID NO: 1616 - DNA, 477 bp, Homo sapiens
  misc_feature (1)...(477): n = A,T,C or G
tgaggtaccgcgtcagatttgntgatatgcctgggaaatcaaggaagaagaagaaaaacatgaaggagctgactcctcttcaagctatgatgctgcgaatggcaggtcaggaaatccctgaggaaggacgggaagtggaggaattttcagaggaggaggatgccgacaactcggatgattctgaagccgagaaacagtcgcagaagcagcataaagacgatgcccactctgacagcacggctgcagcctcttcccagcagcaggctcctccacagtctgctcctgcttctcagatacaagcccctcccatgccaggaccaccacctcttggaccaccacccagtttcttcatcagaagacaagggaacgagaaaactgctgntcgtttgtatttgngaacttggctgtaatctggtatgccataggatgtcagataataccactggttaaaataaagcctagttttcaaattcaaaa

SEQ ID NO: 1617 - DNA, 344 bp, Homo sapiens
  misc_feature (1)...(344): n = A,T,C or G
ttgaggggtctccttatgtcggggnccaggttccctgacaacaggaagatggtcattaacagtggtagcgtcttcagggttcgcattcttccanaccacggcctgtgtgcangaatgatgtgataacacgtncanaccccagcgtttgcagagtctgtcncagagggagatgtcaggtgggagaaagctgttggagatgcctgttgcagaagatgaagtggtgtgtgagattgagacagacaagacttctgtgcaggttccgtcgccagcaaatggcatcattgaagctcttttggtacccgatgggggcaaagttgaaggaggaactcctctgttcacactca

SEQ ID NO: 1618 - DNA, 408 bp, Homo sapiens
  misc_feature (1)...(408): n = A,T,C or G
cgaactaaaggctgtcaaagtctatacactttaaagtggataatgatgaaaatgagcaccagttgtcattaagaacggtcagtttaggagcaggggcaaaagatgagttacacatcgtagaggcagaagcaatgaactatgaaggcagtccaattaaagtaacactggcaacntttgaaaatgtctgtacaaccaacagtttccntagggggctttgaaattacaccacctgtggtcttacngttgaagtgtggttcagggcctgtgcacattagtggacagcatctagtagctgtnnnaggaagatgcanagtctgaagatgaagatgaggaggacgtaaaactcttaggcatgtnnggaaagcgatntgntcctggaggtggnaacaaggttccacagaaaaacag

SEQ ID NO: 1619 - DNA, 337 bp, Homo sapiens
  misc_feature (1)...(337): n = A,T,C or G
gtaaccagttgctggtttgtggttacccagnccnngcctgcagagcccaatgccatgagcatggtngtgcagcctgtggaggagaaagctgtgcacctcgtggtcaccgtatctccacggcaggggaagaaagccctggaagaggccctgcttgngnttaatcccatgagccaggatctcantgccacagaggcccagctcgtggccttactccagggnctgcgagatgatggntccaaccgaccattcttcgaagcggngatgcccatgggtatagnanatgcncagccancccccccanncagacaaagctacaagcncgtaccattaacccacc

SEQ ID NO: 1620 - DNA, 380 bp, Homo sapiens
  misc_feature (1)...(380): n = A,T,C or G
tgagaaaattacaacaccagactctcgcggntcgacatcgccaacacgcttagggaacaagtccaagacctgtttaacaagaaatacggtgaagctctgggcatcaaatacccagtgcaggtgccctacaagagaatcaaaagcaacccaggctcggtaatcattgaaggcctaccccccgggatcccattccgcaaaccctgcacctttggctcccagaacctggaaaggattctctctgtggctgacaagatcaagttcacggtcaccaggccattccaaggacttatcccaaagcctgangaggatgatgccaanagactgggggagaaggtgatcctccnagagcaggtgaaggngctcttcaatgacaaatacgg

SEQ ID NO: 1621 - DNA, 309 bp, Homo sapiens
  misc_feature (1)...(309): n = A,T,C or G
tcttgatgaaagagtgaaagcgtntggagtcagccctgaaagaagccaaagaaaatgcatctcgagacctgtaaacgctatcagcangaagtagaccgaataaaggaancagtcaggtcaaagaatatggccagaaggggacattctgcccagattgcaaagcctatccgccctggacagcatccagcggcctcgccaactcacccaggcacagttcgtggaggaggcgtcatttgtctcanaacaaccanccagtggngccttnntggtnggtggaggcaagcagtcgtanacacttgacacattgta

SEQ ID NO: 1622 - DNA, 340 bp, Homo sapiens
  misc_feature (1)...(340): n = A,T,C or G
ccacagcaccactggnaggctgatcatggacatcccgcgacaggnttggaagcactcccaggggagcaaaagatcgnctaaaagccataatgaaaagggnaaaccataaggnccctcacgttgcttctgnaggcattgacccttcttggagcttgtgtggcaaactgtggaaaganattncatttagaagnatgttcccgcgattntgcaacggaggggcgtnctgcgatgaaaaataaggntcatcctaaagccccgcgaaaaactaaaatctctaatggtggantggccagaagaacttccanaaggnanntccaattcatggtgatatctgctacta

SEQ ID NO: 1623 - DNA, 402 bp, Homo sapiens
  misc_feature (1)...(402): n = A,T,C or G
gactgaggtgaaatgtcccaccatgatgttctggatgctgcttccaaagggatcaatgtcatcctttgtgaacacagcaacactgaaagaggcttcctttctgagcttcaagaaatgctgggtgttcactttgagaataagattaacattatcctgtctgagacagacagggaccctctccgtgtggtttaaatgcaaggacngtcaaggacaccatgatgacagaagccacagatcacctggattgaaacggctgtgcaggagttggtgttccaccctctgcagagctgtattggacttctcatttcagttcacgactctggctcaacaaaagccatagctcattcggtaaaactgtctgtaaagagtacattaaaggcaaaccttctctaaaaaaaaaaa

SEQ ID NO: 1624 - DNA, 484 bp, Homo sapiens
  misc_feature (1)...(484): n = A,T,C or G
gatggctcccgcctgctgtccattagggaaggccaccccatatacccccagcntccgaccaggctacattcccatccccgtcctccatgaaggctccgagaaccggcagccccaccttttccatgcctactcccagcctggggtgcagcgatttcgtaccgaggctgcagcggccactccgcagaggtcccagtctcctttacgtggcggcatgacagaagccgcccagacagataaacagtgtggacagatgccggcaactgcaacaactgcagcagcgtcagcccccaactgctcatggacctgagcgatctcagtctccagctgcctctgactgctcatcctcttcctcctcggccagcctgccctcctccggcaggagcagtctgggtagccatcagctcccccaggggctacatccccatccccgtgatacatgagcagaatatcaccctggccagcagccccagccctccttccaccc

SEQ ID NO: 1625 - DNA, 441 bp, Homo sapiens
  misc_feature (1)...(441): n = A,T,C or G
aaggacatcggaggccaaggatagatannaccagannntntggaaggtgggaacaangcgatacatattcagtcnacaannntgtcancatgtncanantgngntaaacgtggccatttgtnannaaactggccccttaccacacaaaggtccggncctgctgnctctgctcagagagaggacatctccagtatggctgnccagcccgttactgcttagactgctctttgcccatgtcttccaaccacagatgttttgaaagattgtcctggagaaaacgatgtgaccgatgtgatatgataggccaccatgctgacncttgcccagaaatctggaggcagnatcacctaacgtccaaacctggaccaccaaaaaagccanagaccccttctggacaatcagcgntagtgtattgctacaactgtgcacagaaaggccatt

SEQ ID NO: 1626 - DNA, 398 bp, Homo sapiens
  misc_feature (1)...(398): n = A,T,C or G
gactgaggacattttctacgttgaaaatcaaaaggaatatgaaaataaaaaagctgctagaaaaagaagaacacagcttttggggaagaaaatgaaacaagctattaaaagtctgaacttccaggaggacgatgacacatctcgagaaacgtttgcaagtgacactaatgaggccctggcctctctcgacgaagcccaggaaggacctggcgagaccaagctggatgctgaggaggccattgaggtggaccaccctcaggacttggacatcttctgagcacactggggacattttgaagaataaacctttgtttaaaaagttgttaccattnatantgangttgctttactgtgtactgagactagagaaaggggcgctgttcctgtttctgtgtatg

SEQ ID NO: 1627 - DNA, 282 bp, Homo sapiens
  misc_feature (1)...(282): n = A,T,C or G
actgaggtttgagtcctgggaagacattgacaaactaaattcattccccaagcttgaagaagtgagattgctaggaattcctcttctacagccgtataccaccgaggaacgcaggaaattggtggnngccagattgccctncgtttccaaactcaatggcagtgttgtgaccggatggtgagcgagaggattccgagaggtttttcatccggtactacgtggatgttcctcaggaggaagtgccattcaggtatcatgagctcattacaaaatatgggaaat

SEQ ID NO: 1628 - DNA, 472 bp, Homo sapiens
taataaagaccttctggtcaaggtgatggaaatggctgatgggattgaagtggaagacctgccacagtttacaaccagaagcgaactaatgagaaagcatcaaagctaaggcagatctccacatttccaccctggggacagacttagaaaggaggccagggtgaagatgactgaacattggcagctctcaagattcctggcatttgcagcatagaggcagctagactggaagaggacggggcccatagcttcaaagacatcttcattcttccaggattgctgtaaaatacaaatgcatatttatgtatttatacatggcgaactctcagaaatttcatcaggattgtccaagccaaactttgtttgaaatgccttttatgttgatataataatgacaggtgatacattttataatttgattctttttaaaacagagtacctgtaaatacagttcttgttttgccgtacccca

SEQ ID NO: 1629 - DNA, 520 bp, Homo sapiens
gactgagagtttgtttttctcctgtctgacaatggtgtctggagaaatcggtgagctaccaggctgtagaaatcctagaaagattcatgctgaagcaggcagaggacatctgtcggcaagccacactccagctgagaggtaaagacacagagctgcagagctggagggcactgaaagagcagcttgtcaacaagttcatcctccgattggtgtcgtgtgttcagctggccagcaaactgtctttccactacaaaattgtcagcaacattacagtcctgaatttcctccaggctctgggttatgtacacaccaaagaagaactgctggagtcagagctcgatattttgaagtccctgaacttccaaataaatctgcccactcctctggcatatgtggagatgctccttgaagtcctagggtacaatggctgtttggtccctgccacacaactacatgcaacttgtctgaccctcctcgacctggtctatcttctgcatgaacccatctatgagagtgcaca

SEQ ID NO: 1630 - DNA, 504 bp, Homo sapiens
atggtggggctcccggagggcctgcgttccctggacaaactcaggatccgctatatggttactttgctgctgtggctggacaggacggacaaattgatgctgacgaattgcagagatgcctaacacagtctggcattgcgggaggatacaagccttttaacctggagacttgtcgccttatggtttcaatgttggatagagatatgtccggcacgatggggttcaatgaattcaaagagctctgggctgtgctgaatggctggagacaacacttcatcagtttcgatagcgataggagtggcaccgtggatccccaggagctacagaaggccctgacgactatgggattcaggttgagcccccaaactgtgaattcagttgcaaagcgatacagcaccagcgggaagatcacgtttgatgactacattgcctgctgtgtcaaactgagggctctcacagatagctttcgcagacgggattcgggtcaacaaggagttgtgaata

SEQ ID NO: 1631 - DNA, 380 bp, Homo sapiens
  misc_feature (1)...(380): n = A,T,C or G
ttccgcggacccccagnatgnnacattaaacttaccaggtttaagttccggtaccgaggctggttcttcagaaggaagacatcccgggctggaaggaagagcctccctcagcanagcatgttggttttcccccttcaaaaatcgtctgtaccagcggccttgctgtgaacctaggagaaaagacagtgtggaggaagtgcatatgcgtagctatcccttanagtccaagaggcnctggntacgggancccctggacactnagcacatggntgctgaanacccaggattgatnaccannatcnacatggtntntcataannngaggagattntgacncccttctncctgantccaacaggcaccagacaagatttctctgt

SEQ ID NO: 1632 - DNA, 378 bp, Homo sapiens
  misc_feature (1)...(378): n = A,T,C or G
gtacctgtcagtgctgtctgggtggtatngggcacccagaatgcttcagtctgtgatgatctattnataaggtggccttactagagtttggaacagggcttcagattggccaaaatgggaaggactggattctgctctctcccacgaagagttagnggactggctaagatcaaagtctgaggctnctccatcaccaatcaggaacagctgctgtgctaaagtacagagagatgtancgnacaataaagngttaccaaaatgcacatggctactcactctcctgagaanacccacangcgtnatnactgtgagaaaatgttncaccggaaagaccatctgaagaatcacctccatacacatgaccccaacaaagagacc

SEQ ID NO: 1633 - DNA, 409 bp, Homo sapiens
  misc_feature (1)...(409): n = A,T,C or G
gtgcacgtcccagttctgcctctatccgggtatgccaacctgtatgtcagtggcctccccaagaccatgagccagaaggagatggagcagctcttctcccagtacggccgaatcatcacttccagaatcctgctggaccaggccacaggtgtctctcggggtgtgggattcatccgctttgacaagaggatcgaggcagaggaggccatcaagggactgaatgggcagaanccactgggtgctgctgagcccatcacggtcaagttcgcaaacaacccaagtcagaagacagggcangccctgctcacccacctgtaccagtcctctgccaggcgctacgccggncccctgcaccatcagacacagcgttttcggctggacaatttgctcaatatggcctacggagtca

SEQ ID NO: 1634 - DNA, 537 bp, Homo sapiens
actgaggtgccgttcgactcaaacatgaatagaacaaagaacaggcctctggttcgagggcagataagcccattgctagccgtgtcttttgccacctgctgtgctgtgccaggagtggcccttctgacctggggagtgaatccactcacaggggccttgggggtcttcaacattttcctgtatacctgttgttacacaccactgaagagggtcagcatcaccaatacctgggttggagccgtggttggagccatccctcctgtcatgggctggacggccgccactggaagccttgatgctggagcgcttcttctgggagggatcctgtactcctggcaattcccccacttcaatgccctgagctggggcctccgtgaagactactcccgaggaggctactgtatgatgtccgtcacccatccagccctctgccggcgggtggcactgcgccactgcctggccctgattgctctgtcgactgctgccccggtcctggacatcaccacctgggtcttccctgtcatctccctccccccc

SEQ ID NO: 1635 - DNA, 375 bp, Homo sapiens
  misc_feature (1)...(375): n = A,T,C or G
acgaaagcaaataatgttgactatactgnacactcagtcagaagagctctagaaaatactgcaataaaagctgacaatatagaagtatttgcccaaggacatggaattattcaggttgacaaagcttatgactacctcattcaaaatacatcatttgctaacagattaggttttacagttactgttggaaataaccgtggtatctacctccgagatcctgtccaggtggctgctccttcagatcatggtgttggcattgagcctgtatttccagagaacacaggtaagtactagggtggcagtaagcagaagcatttgtatttgtggcttaaatgaatggtaaataaaagaagaatgctgctttaaaaaaaaaaa

SEQ ID NO: 1636 - DNA, 540 bp, Homo sapiens
  misc_feature (1)...(540): n = A,T,C or G
ggttctatgggaatgtcagccggttcataaaccaccactgcgaacccaaccttgtgcctgtgcgagtgttcatgtcacaccaggacctgcggtttcccaggattgccttcttcagtacccgcctgattcaggctggggagcagctcgggttcnactacggggagcgcattttgggacgtcaagggcaagctcttcagttgccgnngtgggtnttccaagtgtcggcactcaagcgcagccctggcccagaggcaagccagtgcagcccaggagcctcaggagaatggccttccagataccagctctgcagccgntgctgaccccctatgaattgccagtgtggtcagtgggaccctcaanatcagattctggngantgcaatnnanagaggaagaanctctacatatgttcaanaggagntggaggtatggacncctttcangaatgtttttgggccctgaggngnncatntagntggcccagngctnaacgccacagnatgcctctgggccggccanggccagggccaggggactttcc

SEQ ID NO: 1637 - DNA, 485 bp, Homo sapiens
  misc_feature (1)...(485): n = A,T,C or G
gactgaggcttagcgttgactggtgggctcttggagtgcttatgtttgagatgatggcgggaaggtctccgtttgatatcgttgggagctctgacaatcctgaccaaaacacagaggattatctattccaagtcattttggaaaagcagatccgcatcccgcgttctctgtctgtaaaagcagcaagtgtacttgaagagttttctcaacaaggacccaaaggaacgattgggttgtcaccctcaaactggatttgctgacattcaaggacatccattcttcanaaatgtggactgggacatgatggagcaaaagcaggtggttccaccctttaaaccaaacatttctggagaatttggtttggataatttcgattctcagtttactaatgaaccagtccagctcactccagatgatgatgacattgtgaggaagattgatcagtctgaatttgaaggttttgagtatatcaaccccctcttgat

SEQ ID NO: 1638 - DNA, 491 bp, Homo sapiens
  misc_feature (1)...(491): n = A,T,C or G
tgaggctgaaggtgaagacagcctgaanaagatgcagctgatggagcttgcaattctgaatggcacctacagagacgccaacattaaatcaccagcccttgccttttctcttgcagcaactgcccaggctgctccaaggatcatcactgggcctgcgcctgtcctcccaccagctgctctgcgtacacctacgccagctggccctaccataatgcctttgatcagacaaatacagaccgctgtcatgccaaacggaactcctcacccaactgctgcaatagtccctccagggcctgaagctgggttaatctacacaccctatgaatacccctacacattggcaccagctacatcaatccttgagtaccctattgaacccagtggtgtgttaggngcggtggctactaaagttcgaaggcacnatatgcgtgtccatccttaccaaaggattgtgaccgcagaccgagccgncaccggcaactaacctatgg

SEQ ID NO: 1639 - DNA, 144 bp, Homo sapiens
  misc_feature (1)...(144): n = A,T,C or G
tgctcagtgccaaccctgcagtacgactacagccaagcacggtgtnacccaggctttcngacagcaaagccccggctatgagcacgtgagccctccacctnaggaagcaaaaggctgtatttaanaaaaaaccctctgatgaga

SEQ ID NO: 1640 - DNA, 515 bp, Homo sapiens
  misc_feature (1)...(515): n = A,T,C or G
actgagattgttaccagcgcttagaattcctgggagatgcgattttggactacctcataaccaagcacctttatgaagacccacggcagcattctccaggggtcttgactgacttgcgctctgcccttgtcaataacaccatctttgcatcattggctgtgaagtatgactaccacaagtactttaaagctgtctctcctgagctctttcatgttattgatgactttgtgaagtttcagcttgagaagaacgaaatgcaaggaatggactctgagcttaggagatccgaggaggatgaggagaaagaagaggatatcgaagtccccaaggccatgggggacatttttgagtctcttgctggtgccatttatatggacagtgggatgtctctggaggtggtctggcaggtgtactatccgatgatgcagcctctaatagaaaagttttctgcaaatgtgcctcgttctccagtgagagaattgctcgagatggaaccanaaactgccaagtttagc

SEQ ID NO: 1641 - DNA, 400 bp, Homo sapiens
actgaggtgcggaagattgcacctgatattatgaccacctgccgcagcaccactcctgggtgaaagtgctctgggacttcgtatttgaggactctatgggaccctactccagggttaagcgcaagtgtaagctggcgaaggaccacctgtgagccctgccgaccagtagtccagatcgagcagccatacgcctcctgcccgtgtgcctgcatcagcttctgcagtctaagctgcttctgggtctgttgtgcccagcaagtagatagatacagagtaaccaggcttacctgaactttctgggtcttagctatgactgaccaggttacggagcaggcagtcccacggagctgccttcctctatgcccgaaattaaatctaatatgcctttataaaaaaaaaa

SEQ ID NO: 1642 - DNA, 411 bp, Homo sapiens
  misc_feature (1)...(411): n = A,T,C or G
tgggtttgcctgatgaagccactccacattattttgccttaattgaccaactaattgaagggcaccaatggctggaaaaaaatctaggagtgaaacctcgatcgggctgggccataganccctttggtcattcacccacaatggcttatcttctaaagcgtgctggattttcacacatgctcatccagagagtccattatgcaatcaaaaaacacttctctttgcataaaacgctggagtttttctggagacagaattgggatcttggatctgctacagacattttgtgccatatgatgcccttntacagctacgacatcccctcacacctgtgggcctgatcctaaaatatgctgncagttngattttaaacggcattcctggaggcanatntggttgtccctggggagt

SEQ ID NO: 1643 - DNA, 238 bp, Homo sapiens
  misc_feature (1)...(238): n = A,T,C or G
gcccatatacggcaaaatgagaccgtttgaaggcttccagcggaaagctattgtaatctgtccaactgatgaggacctcaaagaccgcacagtaaagccgaaccggacgaagaagggaaggatgtcccagatcacgcagtcttagaaatgaaagccaacttcactttgcctgatgtcggggacttcctggatgaggntctgttcattgagctccagcgggaggaggcagacaagctgg

SEQ ID NO: 1644 - DNA, 443 bp, Homo sapiens
  misc_feature (1)...(443): n = A,T,C or G
gatgtcgttctgtgatccaggcaacaagctgcntccttgggcttggctatgttttctctactggtccagcgctgcacatgcctacttaaggactctgntaaagctcagctgtcctctcctgaggaccaagaggaccaagatgacatcaaggtatcttncttngtcccggacctgaaggagctgctccccagtgtgaaagtctggtctgattggatgcttggctacccagacacctggaatcctccacccacatctttggatctgcccttgcaggttgctgtggatgtctggtcaacactagctgatttctgtaacatactgactgcagtcaatcagtctgaggngccactgtacaaggacccagatgatgacntnaccctgcttatcctgnangangatnggcttnntatntggctttgnccctcttgctggctgccactaaa

SEQ ID NO: 1645 - DNA, 524 bp, Homo sapiens
  misc_feature (1)...(524): n = A,T,C or G
ccgaagggtggtagccccagtggagganncagtggtggtgctaatggtacctctttcagctacacattccacggagacccccatgccatgtttgctgagttcttcggtggcagaaacccctttgataccttttttgggcagcgcaacggggaagaaggcatggacattgatgacacattctctagctttccaatgggtatgggtggcttcaccaacatgaactttggacgttcccgcccttctcaagagcccacccggaagaagcaagatcctccagtcacccatgaccttcgggtctcccttgaagagatctacagcggctgtaccaagaagatgaaaatctcccacaagcggctgaaccctgatggaaagagcattcgaaatgaagataagatcctgaccatcgaagtgaanaggggctggaaagaagggaccaaaatcacctttcccaaggaaggggaccagacctcgaacaacattccagcagacatcgnctttgttttaaaggacaagccccacaatat

SEQ ID NO: 1646 - DNA, 339 bp, Homo sapiens
  misc_feature (1)...(339): n = A,T,C or G
gactgaggcagtataattcgttgtatgaggcgtctggaagactgcttcgacagatgtgtnaagcancaaaagccattggaaacacagagctggagaacaaatntgnctgaaggaattaccaaaatcaatgagggatattgtatttgctgccagcctctacttatagagntcagcgttatccaccacctgtctgattgcaacatgactacaaacgcttcccagtgttcagtggttcacaagctttttattatatttaagtcaacatcattctgagaaggcatgtaacatacacatttgtacatagcgtctttcaataaaaatgtacaggtgggacagtga

SEQ ID NO: 1647 - DNA, 314 bp, Homo sapiens
  misc_feature (1)...(314): n = A,T,C or G
acaaagcatccacagcattttccggacagcatccatggtgtgtctgaacaagtctagcccagtgcccccgaagagccccgtccgaagcctttccaagcgactcctccacctccccagtcgctctgaactcatctcaactacattcaagaaggaaaaggccaaaagctgttccatcatgtgaagtcagagctggaggcgggggagacagccccccacttcctcccttggggtgcagaggcacggggagagggaggatgagacggcttaagacaccggatgtgacatttttcanatggccacagaggactttaatg

SEQ ID NO: 1648 - DNA, 104 bp, Homo sapiens
gactgagagctgatggagttatgagtacaatgaacacagaaaaactcttaaaaactgtaccaattatccaaaatcaaatggatgcacttcttgaaaaaaaaaaa

SEQ ID NO: 1649 - DNA, 441 bp, Homo sapiens
  misc_feature (1)...(441): n = A,T,C or G
ccaacggtggcacctgcctgaggctatcttgnggacnagggatgtgccanngngcccctggatttcctgnnngagacttgccagttncctgacccctgcagngatacccaactctgcaatgaatggtggncatctggcatgccctgctcntccacacccnnaagcnnccgnannactacttctcnactgaccnctgacttatcctgnacctgtccctttggcttnaccgnngatcgatgccaaacccatgtgnangagctctgaccaccttntttctgttccaacgggggtcactgttatgnnnangcntnangccggcnacagtgctcctgcgagcctggntggacaggtagagcaatgncagctcctgagacttntgctcagcacaacccctgtgccaacggaggcagtgtgnntgngcacatacccccatatccagag

SEQ ID NO: 1650 - DNA, 319 bp, Homo sapiens
  misc_feature (1)...(319): n = A,T,C or G
gactgaggaagatgatcctatgatctcgagaagacctttctttggcaatgagggaactacaaagaaccaaatataattctgaaattcaggatctgnnntgaangntgngagcnttnngccttactctggcttcttcgcacatgtgcacngngctgagcacaattcaataanaggttttgaggctaaaaacaaagagcctngacccccatcttatantgnnanagnagttggnctctctgggactgaaaaagacaaaggaaactgtggagttggaaaatcttgtttgtgcaatagatttgtncgttcaaaagcaaaaaaa

SEQ ID NO: 1651 - DNA, 517 bp, Homo sapiens; identical to SEQ ID NO: 58

SEQ ID NO: 1652 - DNA, 518 bp, Homo sapiens
  misc_feature (1)...(518): n = A,T,C or G
ctcgtgatgcagagagcataatgctgaaccttgcgggacagctcatcatgatgcagagggacaggtcaggcccgcagatccgggagaaggacagccaccctaaccaaaggaagcttctgccgttctgtcctcctgttgtactagcccagtcggtggaaaatgtctggactacctgtcgagcaaacaaacaaaagcgtcaccttctggaggccctctggctgagctgtggtggtgcggggatgaaggtttggctccctntnttccccagggatcatcgcaagccccactccttcctgtcccagcggatcatgctgccgtttcatatcaacatttaccccctggccgttctgtttgaanacgcgttggtccttggtgctgtcaacgacactctcctntatgattctntgtatacccggagcagtgccagggagcagctggaggtgctctttcccttctgtgttggggagaggacctttnaaatctacctccaccatatcctccgccagctcagatgaaca

SEQ ID NO: 1653 - DNA, 446 bp, Homo sapiens
  misc_feature (1)...(446): n = A,T,C or G
ggaagggccaggtgctgaagtcccanagaacttcatgagctgtacgagggtctcaaggtgaacgatgtcaataagtatgactacgtgcgtcacgtggttacacagagagacaagtctttcctggccatggtggtggacattgtgcggnagctgaagcaacagaactctcgccttgngtatgtgtgtgaccctgtgatgggcgacaagtggaatggggaaggctccatgtacgttccccaggacctcctccccgtgtacagggacaaagtggtacccgtggctgacatcatcactcccaaccagtttgaggctgagttgctgagtggcagaaaaatccacanccaagaagaagccttcgaggngatggacatgctgcactgtatgggtcccgacactggggtcatcaccagctntgacctgccctcctcacagggcagcgactacct

SEQ ID NO: 1654 - DNA, 433 bp, Homo sapiens
  misc_feature (1)...(433): n = A,T,C or G
gaggctgtcataaggacccatggaactcagtcactggnctgctggcttacctgcacaatgtctctgcatccatctgtcggggatatctgtggtctatgatgatgatgtcatggagtttgtcctggaaacaggaattagagaaatgaagatcactgttacagacctaagactgaggaatgaggaactttctggaaaagtgaaaggtatggagcccaggtgcaggaggagccatctatcgtcttgggacgtgtcaccatgggataccacagtgacaatgggcacaaatgaatgctgaaggcaggactgtccaggacagtcaaatgacagactaggggaagatggcagtgtgagaaacagcagaagctttctacctaggcaatgctgctctggcaaaccgtgtctacaataactctttgttatcccgtgtaaaaaa

SEQ ID NO: 1655 - DNA, 358 bp, Homo sapiens
  misc_feature (1)...(358): n = A,T,C or G
ccccatgctatgtgtatgatctggccaagaacttcaaccttgaggtgtccctgtttgaacggctggtaaaagtgaacatcccctttgtccgtctgaattaccagcaccgcatgcgccctgaaatcgcccgccttttgaccccccacattnaccaggatctggagaaccatccttctgttctcaagtatgancanattaagggtgtctcctccaaccttttntttggggagcacaactttcctgagcagganatccaanaaggcaaaagncaccanaaccagnatgaggcncnctttgtggngnagctgtgccantacctcntgtgccagnagtaccngccctcccagatcaccatcct

SEQ ID NO: 1656 - DNA, 439 bp, Homo sapiens
  misc_feature (1)...(439): n = A,T,C or G
gtttgaggaaccatcatcctggactttgtcaacatggntaccaacattgggaaggcaaccccaaaggacagntnatatgtggaagaactggaagcccttttcccagatctgcccaaaagaaaggacatatttgattccctgcagaaggccaagtttgactgtctcangantnancnttnnanngatgctcccntgggaccactnaacnntgnncanangngcnnccntancnncagntgganncaganntnnntactaaaggnnctacctgtgannaacanacctattcacatttctcattgactttctgccatgatcacagctatgatgccctggttgccatgactatctttttcaacactcaaaatgagccagtacggcaattagctatcttctgtccacacgaggcacttcgaatgacaatctgtggcatcctgga

SEQ ID NO: 1657 - DNA, 553 bp, Homo sapiens
gactgagcctggaactgacgaggcatgaacggtccagtggctagtccagactatttatcatctgacttctccagttccaagcactctgaacatcccttaagcctctacttccaagctcagcaagtgggattccctcccagcctcttacaccattacatcgagcaccatggatgtgtgactcctccctagtagtgcaggtgcactcactactcccttggtgcaagccgagacacaatcggcccagagccaaggagggcccatacttaagctttctgtctgtcgtacctggggttcacctggttcactggaatgttgaggcgggcagcaatgtcttccacagtctcattgccttctgagataatgcctacccccttggcaatggctttcgctgtgattggatggtctcctgtaaccatgatgacctgaaacaggaagttgaatgacatgtatcaacttatgaaaaatataaacacggttttacggaaacacatcccaacaccaagattttatgacacatgaccacatccatactgcatatatcatacttccttcc

SEQ ID NO: 1658 - DNA, 546 bp, Homo sapiens
  misc_feature (1)...(546): n = A,T,C or G
aggtctgttggcacggntggaagacaacgagacgagcaaaccagcaggcacctgaccctgttccaggcagcctgccggggctaccttgcccgccagcacttcaagaagagaaagatccaggacctggccattcgctgtgtgcagaagaacatcaagaagaacaagggggtgaaggactggccctggtggaagctcttcaccaccgtgcggcccctcatccaagttcancctgtcngaggannagatccnaaacanagacnaggagatccagcagtgtgcgcantacgcttgaganggtggngaaggagaggaatgagcnncnactcatnngtgaccggatanagacccngntctnanaactgacatcggnnctgncngntgaacgcancacggnagagtccgcctcccanttgctggacncnnanacagccnanaggcttccggaccgagaangnnatnaangagctaccnacccagtntgacgcactgannaagcanatggacgtgatggatcatggaagntgagagcagaaggtaacccaacgt

SEQ ID NO: 1659 - DNA, 439 bp, Homo sapiens
  misc_feature (1)...(439): n = A,T,C or G
actgagcttcctaggaatgagagtaaacaacgtttatgatgtggataacaagacatatcttattcggcttcaaaaacctgattttaaagctacactgttacttgagtctggtatacgtattcatacaacagaatttgagtggcctaagaacatgatgccgtcgagttttgccatgaagtgtcgaaaacatttgaagagtcggagattagctcagtgcaaaacagcttggtgtggacagaattgtggatttccagtttggaagtgacgaagctgcttatcacttaatcattgagctctatgacagggggancattgntcttacngattatgagtacctaatttnaaatatcctanggttncnaactganganncaaatgatgttanntttgctgnnngtgaacgctatnccatagatcatgccatgagctgctgaacctt

SEQ ID NO: 1660 - DNA, 509 bp, Homo sapiens
  misc_feature (1)...(509): n = A,T,C or G
gaggaccatctgtcacacaggtgacaagaaatgtgccaccgggacttgatgaatacaaccctttctccgactctcgcacgcctccaccaggcagtgtgaaaatgcctaatgtacccaacacccagccagcaataatgaagccaacagaggaacatccagcttacacacagatcacaaaggaacatgccttggctcaagctgaactgctcaagcgccaagaagagctggagagaaaagctgcagagttggatcgtcgtgagcgcgagatgcagaacctgagccagcatgggagaaaaaataattggcctcctcttcctagcaattttcccgtgggaccttgtttctatcaagacttttctgttgacattcctgtagaattccagaagacggtgaagcttatgtactacctatggatgtnccatgcnncgaccctgttnctgancatnttcagatgcttggcctggttttgtgttgattcctcgagagcagtcgactttgggctgagcatc

SEQ ID NO: 1661 - DNA, 499 bp, Homo sapiens
actgagagacagaagaaatgggggatgaggaagttttctcctggctgaagtgtgcaaaggggcagtcccacgaaccagaaaacctcatgcccacccagatcatccctggcacagcgctttacaatattggagacatggtacactgctgcccggggaaagtgggggattaaagctaactgcccttgtataagtcggcaaagcaaatctgttttgagacctgctgtcaccaatgggatatcacagcttcccagtgtaacccctagtgcctcttctggaaacgaaactaccttctcaagcggaggcggagctgcagcggtcacaaatccagagccagaccaagttcccaaaggtgctggcactgacggcagatctgaggagcccctaaaagcagaaggttctgcgtcaaatagcaatagtgaactaaaagccatcaggcccccgtgcccggacacagcttttcagagcaaaggaataaaagtcactcattgaaaaaaaaaaa

SEQ ID NO: 1662 - DNA, 514 bp, Homo sapiens
  misc_feature (1)...(514): n = A,T,C or G
tgagacccgtcgaggncagtcagctccctaagctctctaccaaatggcaagtccagctcacgcttagcgggtggagacacgtttcgagagtttacggtcggccctcctcccagcgaaaaggggcggagcgagctccggaagaggcctgagagtgttcgccgcgagatggggcggggcgatcgccggaaagagctgccattcagcagtggcgctcggaaggacggatagctgcctggctacatatccccatccttcagagccacttcattgcccctgctgcttccctgggcttttgcttccaccacgcaaaaccccattcctcaacactgactctgtggctaggagaaggacccagcagactcccgggatatgctacacaccaagttggagttgcaggtgctgtatttgatgttagcaccaggaaagtactggttgtacaagatcgaaataaattgaaaaacatgtggaagtttccaggaggcctgtcggagccaggagaagatattgcagacac

SEQ ID NO: 1663 - DNA, 243 bp, Homo sapiens
  misc_feature (1)...(243): n = A,T,C or G
cagcctgcgaggacagctggggcagnggctggagagaggcgangccttgaagtatacatgaagtccanangaggagcaaagcctctggcgttctggccccccccggcaganagagtacatccaccccgagtnccgttnggncccggaaanttgaatagaagaagccactgganagagggcagatgggttggncatgttaggagccgggagaccaaaggagagncttgcctccccactaaaaaa

SEQ ID NO: 1664 - DNA, 338 bp, Homo sapiens
  misc_feature (1)...(338): n = A,T,C or G
ccttggaattacaaacattncaagaagtganaatgaattacaatgagctaacagagataccatattttggagaaccancacctaatattactctactttcattggtgcataatttaatcccagaaatnaatgcagaagcattcnagcntttattctgctcttgagagtttagacctcngnttcaatataatatcananntcannacatnttcntttcctcgaatgtcnctgaaatanctgaagcngagcaatantangataggcaccttggaggctggctgntatgacaatcttatcanattctttattagtgnnaaaactgaaccggaaccgaatag

SEQ ID NO: 1665 - DNA, 134 bp, Homo sapiens
  misc_feature (1)...(134): n = A,T,C or G
ctcatctgtggggaccgngctacgggcttgcnctatgggatcatctcctgcgagggctgaaaggggtttttcaagaggancnttngnaacaaacggtnatatcgggtgcagtcgtgacaagcaactgtgccatg

SEQ ID NO: 1666 - DNA, 138 bp, Homo sapiens
  misc_feature (1)...(138): n = A,T,C or G
ttcgcaatcctgtgtttggtatggagagtgtggaattgcgactggagataagaggtacaantgtaaatattctggcccaccaaaacccctccctactgtctngaataccatnaataaagttcgctgcacccagaaata

SEQ ID NO: 1667 - DNA, 487 bp, Homo sapiens
  misc_feature (1)...(487): n = A,T,C or G
tgagagtgaagaaatcgaagcaatggcagccatttatggcgaggagtggtgtgtcattgatgagaatgcnaaaatattttgtataagngtcactgacttcatggatgaccccaaatggacactttgtttacaggtgatgttgccaagngagnacccggcatacagnaccgacttcttatcaccngaacgctncctggntgnnnggncantancgcgcanacttatcnaacagccttgangagatntatgctcacnncatgggtgaatctatnctttaccagtgggtcgagaaaataagagatgctctgatacnaaaatctcagatcnccganccngancnanatgtcaagaagaanncngacgaggttgaggntgagtccgaanaacaccctattntagagcacccnccgnaaaanccggtnttgctttgnacctnaaannnagggaggaaactcaaccagaaactgncgaattgcctccagttgct

SEQ ID NO: 1668 - DNA, 288 bp, Homo sapiens
  misc_feature (1)...(288): n = A,T,C or G
tggacccacccaaagagcccagcanaggaanccacccanagcggaccctgtncaggctgggctctcgngcctccactctacggaggaccgactccatctatgaggcatccagtctctatggcatatcanccatggacggagtcccctttaccctgcacccaagatttgagggcaagagctgtgggcccttgaacttgtctgcttttggggacctgacgatcaaatcactggcagacattgagaaggagtataactatggcttcgnggtggagaatactgcagctgcac

SEQ ID NO: 1669 - DNA, 536 bp, Homo sapiens
  misc_feature (1)...(536): n = A,T,C or G
gactgagggcagtgactttgacctcctactcttttaaatatagtagataagacagatcttgngttgccananttctttggcccacatttaagtgggatgcagctagcctggnggtgtgaatgaatttcattcactgagaagtctaggggttagttaaccctgaaagatatccacacagcaaaaatgtttgcaaaactaaagaagaaaattgcagaagagactgctgttgctcagagaccaggcggcacaacaaggatcccacgctctgtgagcaaggagtctgtggcctccatgggagctgactctggagatgattttgcttccgatggtagcagctccagagaagatctctcatcccagcttttgagaagaaatgaacagatacggaagttagaggccagactttctgactatgctgaacaggtccgaaacttgcagaagataaaagagaagcttgaaattgcattagaaaaacaccaggattgtncgtattnttttttcngctntctttaancttttccggctttaacctttta

SEQ ID NO: 1670 - DNA, 220 bp, Homo sapiens
  misc_feature (1)...(220): n = A,T,C or G
gagcggagctgctctgggctgctggagtgggaatcgatnagcggatgccgctggagatcgntgngcttcntgaaccattacgagatganaannccanatggtncgnacccatacagtctgaagntgtgcttntacactgcacagcnngcctgcctaattggatgctgggaaggangactccatccgagcnggaaaatgttcctttcctttatgctgatgg

SEQ ID NO: 1671 - DNA, 517 bp, Homo sapiens
tgagtatcccggctgcactgtgtagtagtgaatctttcaagcatggacctcatcttagatgtaaacattcagatttaccctgtggacttaggtgacaagttccggttggttatagctagtactttgtatgaagatggtaccttggatgatggtgaatacaaccccacagatgacaggccttccagggctgaccagtttgagtatgtcatgtatgggaaagtgtacaggatcgaaggggatgagacctccactgaagcagccacacgcctctctgcgtacgtgtcctatgggggcctgctcatgaggcttcagggtgatgccaacaacctgcatggatttgaggtggactccagagtttatctgctgatgaagaagctggccttctgaacttcgtgggaaaccagacttgctgcttagtcactcatgtcatggacactgttcaaggctgtgtagaagctgtcggtgttagcctgtaaaaggggcggaactctgtccactgtggggtctagtctctctc

SEQ ID NO: 1672 - DNA, 512 bp, Homo sapiens
  misc_feature (1)...(512): n = A,T,C or G
actgagatctctgacccgttcggctcctttcctcactcacccaccatggacaactaccccaaactggaggagatgatgctgctgagcaacggggctccccagttcctcggtgctgccggaaccccagagggcagcggcggtaatagcagcagcagcaccagcagcgggggcaggtggtgggggcnggcagcaacagcggcagcagcgccttcaatcctcaaggggagccgagcgaacaaccctatgagcacctgaccacagagtccttttctgacatcgctctgaataatgagaaggcgatggtggagacgagttatcccagccaaacgactcggttgcctcccatcacctatactggccgcttctccctggagcccgcacccaacagtggcaacactttgtggcctgaaccccttttcagcctagtcagtggcctcgtgagcatgaccaatcctccgacctcttcatcctcggcgccttctccagctgcttcatcgtcttcctctgcctcc

SEQ ID NO: 1673 - DNA, 483 bp, Homo sapiens
  misc_feature (1)...(483): n = A,T,C or G
gaatgagaaggacgtnttcccacctaaggaagcacctctgaaaggggaaacgagggcgggnngcccagctacatcccggntgattcccaggcagacatccgggggccccatctgccctgactgtggctgtacctttcctgaccacctcgccctggagagccacaagtgcgcccagaatctgaagaaaccctatccctgcccggattgtgggcgtcgcttttcctacccatccctgttggtcagtcaccggcgggcacactccggngagtgcccttacgtttgtgaccagngnggcaaacgtttttcccagaggaaaaacctgtctcagcaccaggtcatacacacaggcgagaagccctaccantgccctgactgtggccgctgctttngnaggagccggccgntgnncaatnaccggaccacgcacaccggtgagaagcctnatcantgccctagttgtggncgactggttcacctatccta

SEQ ID NO: 1674 - DNA, 439 bp, Homo sapiens
  misc_feature (1)...(439): n = A,T,C or G
gactgaggccctgtctctgcccttggtggtcatcgtgcatggtaaccaagacaacaacgccaaagctaccatcctatgggacaatgccttctctgagatggaccgagtgccctttgtggtggctgagcgagtgccctgggagaagatgtgtgaaaccctaaacctcaagtttatggctgaggtggggaccagccggggactgcttccagagcacttcctgttcctcgcccagaagatcttcaacgacaacagcctcagtgtggaggcctttcagcaccgctgtgtgtcctggtcacagttcaataaggtcattctcctgctttcagtttctgaccccagctcttcaccctccagtcactcangagctcctttgcctctgctcgntgngtagcttaggctgncctcagactnaccagatagcccaggctagccttgactt

SEQ ID NO: 1675 - DNA, 417 bp, Homo sapiens
agagactttttgctagccaaggtaattaatgctgagaacgctgctcacaaatccgacaaattccatacaatggccaccaggacccgtcaggagtacctgaaggacctagctgagaactgtgtctccaacacccccattgactcctccggcaagttcaacctcatctccctgacctccaagaagaaggagaagacgaaggcccgggcaggagcagaacagcacagtgctggggccattgcctggcgggtggcagctcaggactacgcccagggctcagagattgactgcattctgggcatttccaatgagtttgtcgtgctcctggacctgcgcaccaaggaggtggtcttcaactgctactgtggggacgtcattggctggaccccagactcctccacaataaaaatcttctatggc

SEQ ID NO: 1676 - DNA, 155 bp, Homo sapiens
  misc_feature (1)...(155): n = A,T,C or G
acctggcttgggtacctcttctaccgacagcagcttcggagggctcggaatcgctatcccaaaggccagtncaaaactcagccccgcctcttcaatggagtganggtgctnnccatncctgncctctcggacaactacagctacctaatcatcga

SEQ ID NO: 1677 - DNA, 256 bp, Homo sapiens
  misc_feature (1)...(256): n = A,T,C or G
gaactgaggagcgagagcagagtttgggtnacatacagcggcctggagcaggacctcggcaccctaagagagacgctcgagtacctgctgcacctcgggtctccccaggaccgtgcgtgtgctcaacagcagctgtggatggtggaggacacgctggcaggtctgggtggcccccagaaacagctcccacatactgagcccaagtctccatcccctgcaccccaaggagaggagtcctcagagcgggagagtcttt

SEQ ID NO: 1678 - DNA, 271 bp, Homo sapiens
  misc_feature (1)...(271): n = A,T,C or G
gaggagcagactcgaatcactcaaagaagatattaaggaattctttaaaatatcaggttgggagaagaaacttcagaatgctgtttatagtgaactgaatgtggggttgcttacatgtttccgagggcgagttcatggccatcttggnggggaccaanacagcaggnggactggcacagtgttggagtaatagttgagaccttatacccgaagcatanggccaaggtttcctttgccaagtcatccttntgcaccccctgagcatctcaaa

SEQ ID NO: 1679 - DNA, 179 bp, Homo sapiens
  misc_feature (1)...(179): n = A,T,C or G
gttgccaggttaaaatctcagcacccgatgagcagcntctctgagagttggtcgtccaggttttagatcgaaaggacggttccttcatagtangatacagaatgnatgccagctacagaaatctgaagatagaggttanacaccatgggcaacatgtggccgagcctccttatgtttta

SEQ ID NO: 1680 - DNA, 335 bp, Homo sapiens
  misc_feature (1)...(335): n = A,T,C or G
accttggccagcagtncantagtccccaagcaagtgatcgggaaacgcggntctgatgtcatcattgtaggccggggaatacttgcagcggctaaccgcctagaagcagctgagatgtacaggaaggctgcctgggaggcatatctgagtaggcttgctgctcagccgagacagaagacacntgaanatgggtggtatcccaaaagccgctggcttnagagaccantgctcagggccctgcacagggtctgtgaagagagactctgcagcattgtatcatggnctaactngtaatcactgcatngncactggaatgagcagcccttttgaaagct

SEQ ID NO: 1681 - DNA, 443 bp, Homo sapiens
atgaatatagacctcctgtttggaaatcttactatttggaagtcagaccagaaacttcaggctgtactacgatggaaagcactttgttggggagaaacgctttgagtccatccacgatctggtgactgatggcttgattactctctatattgaaaccaaggcagcagaatacattgccaagatgacgataaacccaatttatgagcacataggatacacaaccttaaacagagagccagcatacaaacagcacatggcagtcctgaaagagacacatgatgagaaagaggctacaggccaggatggggtatcagagaaaagggtaagctatcatgaacatttgtttttgtctattgggagtccctgccagagagcccctctctgcccgaaagttcccacagtgttttcagaaggagatgtgggttttgcaatgcccggccccc

SEQ ID NO: 1682 - DNA, 422 bp, Homo sapiens
tgaggtgaagaagcatctacaggacctgtctagcagggtctcaagggctcggcacaatgagctctgaggaccagaagccaccagcagcagcctagagagaacacttgaagacaccgggagctgtcagcatgtcatcggcttgcatagacctgaggtgactggtgtggctgaccaccgtggcaaggaggatcccttgaaataccaagctgatcctacagtggctggcaaggacttattttctttcaagcaagtgtagttgtcaccaccctggacgagggccttgggtaccgctaccagtgagataggactggactccgagctgcagcacaacagtttatattgaaatcacataaacctgcctgccactggaaacattctgtacagagtccttaaatacatggcagagttttgaaaaaaaaaaa

SEQ ID NO: 1683 - DNA, 407 bp, Homo sapiens
tttaccgccctgccttttacaaagcacaacctgtaattcagttcatgtgtgaagttcttgacattcacaacattgatgaacaacccagacccctgactgattctcatcgggtaaaattcactaaggagataaaagataattttcagcttgtggtttgaatgaagcattcgagtttgttcactgaacatctttcagtcccccaaaccaattagagtaggtgacgacatcctgcttgttccagttatcattcattctgtgccattcagtaacaacaaaaaagagatagtcattgtaataaaacatgaaaagaaaagcccttcctgttttgtcactaagcatccatctatctcaagttaagttccaaaataagaaactattaaagataactgtttgcaaccaaaaaaaaa

SEQ ID NO: 1684 - DNA, 459 bp, Homo sapiens
ccgttaatgggaattgaagttccacctccaagaggaggccctgctgatttctctgagcagcctgagtctggttctttgtctgcactcacaccaggagaggaagctgggcctgaagtaggagaggataatgacagaaatgatgaagtgtccatctgtttgtccgaagcaagctctcaagaggagtccaatgaacttatcccaaatgagaccagggcacataaggatgaagagcaccaggcagtatctgcagataatgtgaaaatagaaattatcgatgatgaagaaagtgacatgataagcaattctgaggtagaacaagaaaattctctcctggattacaagaatgaagaagtcagatttattgaaaatgagctagagattcaaaagcaaaaatactttaagctccagtcttttgttagaaacctgattctcgctatgaaagctgatgataaagacgag

SEQ ID NO: 1685 - DNA, 275 bp, Homo sapiens
  misc_feature (1)...(275): n = A,T,C or G
aacggttgaggatggaatccagaagacaggcctaccgtgtcctgggacnctggagggtctgatgaagcaccacccaagcccagcagacctggntttcctagccctgagatccantgaaggattttatcccagcccacngnacatggtccagaccaatcactaccaggtntctggctacccgggttccnanggaatcccagcnntggctggcagcattnnccaaggnnnggcnttntnttnnggaccanacagangtgttggaatcacagacctga

SEQ ID NO: 1686 - DNA, 200 bp, Homo sapiens
  misc_feature (1)...(200): n = A,T,C or G
tccattgccaattccacagcccttccgaccagcagatgaagatcatcgcaatcagtttgggcaacgagaccggtcctcctcagctcccantgttcatataaacacaattgancctnttgaatatcgatgattngattagagaccaggngttncngnggcagatggagggttaaccacaggcttgtgcgtgaccccgcctg

SEQ ID NO: 1687 - DNA, 194 bp, Homo sapiens
  misc_feature (1)...(194): n = A,T,C or G
gaatttgctggctttgcngntgatcanatccccaaatactgcttgccaaactatgtgggcagacccaancatgtgcntgncntggnaggagccctggnaggtgacataatnaatnggccccaaagcaggaggagcactcgngggctgctgncaatccgttaccccatggaacatggcatcgggcaaggactgca

SEQ ID NO: 1688 - DNA, 283 bp, Homo sapiens
  misc_feature (1)...(283): n = A,T,C or G
ttatggctggcctaggaatggaangtcctttgacaaattcagaggaatccatgtccagttacaacttacagtttcctcattatctgggtccacctcagcatccaggtcttctcccacctgcttgccttcggatcctcaaatgtcagggcattctatggacaggtggggcggcttctgctcggatgtggagacttgtatggagatctcccaggaatgggtttattttgtttttgtgacacttgactccttttggggccatacaactntgatttaaaaaaaaaaa

SEQ ID NO: 1689 - DNA, 290 bp, Homo sapiens
  misc_feature (1)...(290): n = A,T,C or G
cgatcctgatcgaaatacgatgaggacgnccagtngtctcattacacagngaagcagacaaagcaggacgggtgccagcatactccaggtcccgcacgggaggcgaacacggccncctcccctccattnatttgtaggccacantgnancanagacttgaagcaacaaacaggtnctnnacctaantnactgggttnncagcattggccacntgatattaaccnatgggtgcgnnagggcagntttaatntntgnatacanctgctggtgatttgaatggttatcccacc

SEQ ID NO: 1690 - DNA, 405 bp, Homo sapiens
ggaaaatggaaccccaggaatgagcagagtgcaacctagatttatttatagtcctctaatttgcagaatggattcagatatggactttccagttgttctccagcctacaaatacaaatgagaaaacacagctaatcagagaaggatctcgaagttactgcacagactcttaatgttggcccgtggagggtccacagctcctctttttggttcagccatgtctctgggtggtcatcggggaagtgcaaacatgaaatgctgtgaacatattcacatttgtattttatttttaggttaaggggaagatgattgctacataattttctcagactttctctttgagtagaatcctaatcaaaagcattcagtttgatgaataaaggcctgaagagttgaaaaaaaaaaa

SEQ ID NO: 1691 - DNA, 512 bp, Homo sapiens
gactgagcctcctggggagagctacatcatgaaagaccccttctcctcagacaaggccaggtttctggtcctcggctctcggtgcagtgtgtgcagcaggctggtgtgtgtgggcccggactgcagcctgttctactccaagagggtctgccttccctgtgtccaggagaacatgagtgctttccctcaggaaatccagcaggatgtagagaagagaaagagcgccagcaagaagcactccagccgtccctgactggcaggggcacagccctcctgcgaagcattgggctgggctcagccaggattcaggctgggagctgtggacccggtcttctttgaactgggtggatacctccagcctcggaagctgaggaactggccagggctgaggacagacatcaggggtgtatccagctggagctctaggtctggcctctggaggccaggagagatggagagggacctcctttgattgacagctggtagacactccctgtagatgcacagctcgc

SEQ ID NO: 1692 - DNA, 176 bp, Homo sapiens
  misc_feature (1)...(176): n = A,T,C or G
ttgcagtatttagcgagctgatctccaagagctnagagatcctaatgatgttccagttagttcaccgaaagcccatggcatcctttgtcaccacacctgncccaccagactttaccagngaattggtaccatcctatgattcagctacttttgttttagagaactttattactttg

SEQ ID NO: 1693 - DNA, 224 bp, Homo sapiens
accgcccatgctggtgttagatccaaataagcgcctctcgatggaacagatctgcaggcacaagtggatgaagctcggagatgcagaccccaactttgacaggttaatagcggagtgccagcaacctgaaggaggaacggcagtcggaccccctcaacgatgatgtcctcttggctatggaagacatggggctggacaaggagcagcacacttcagtcattaag

SEQ ID NO: 1694 - DNA, 154 bp, Homo sapiens
tgaggtcaggtcaagagaaatttgaagaaggatttagtgagaagaataaagatgttagagtatgcattaaaacaagaaagggcaaagtatcacaaattaaaatatggcacagaactgaaccaaggtgatttgaaaatgcccacctttgaatcag

SEQ ID NO: 1695 - DNA, 333 bp, Homo sapiens
tccgaatcattgccgatttacaagtttcctgtagctatgatcacctcactaccctgccacatgtgcaaaagtacctgaagtctgtgcgctacatcgaggagctccagaagtttgtagaagatgataattacaagttgtcactcagaatcgaaccaggaagcagctctccaagactagtttcgtccaaggaagatcttgcaggcccctctgccggctccagctcagccaggttccgccggaggcccacctgtccagatacatctgtggccggcagcctccccacaccgccagtccccagacacaggaagagccacagcctaggcaacaagtggg

SEQ ID NO: 1696 - DNA, 509 bp, Homo sapiens
  misc_feature (1)...(509): n = A,T,C or G
tgaggtgcggccaaacgtagacaagtatgagctgtttgaaaagctggaacttgtgaagggccagaagcggaaggtgaaggaccgtctgaaggcctacgtgcgcgacccctatgctctggacctcattgacaagctgctggtgctggaccccgcgcagcggattgacagtgacgatgccctcaaccacngacttcttctggtcggaccccatgccctcggacctcaagggcatgctgtctactcacttgacgtctatgtttgagtacctggcaccgccacggcggaagggcagccagatcacccagcagtccaccaaccagagcagaaatcccgccaccaccaaccagacggaatttgaacgtgtcttctgaggccggaactggccggtgttgttcttaggttaggagtggattgcttcctttgcatggaacatgtgacatgatgggacatttgagattttctcctccagtacatattaactcccaccctggcactgggaacagctgcct

SEQ ID NO: 1697 - DNA, 306 bp, Homo sapiens
ggacagactcctactctgccggccagtcagtagaaattttggacggtgtagaacttggagaaccatcccataagaaagcagggaccacgtgtgccagaatccatccattcattcattggagacggtttggtgaaaccagaagccttaaacaagaaagctattcagattattaacagggttcgagataagctcactggtcgggatttctctcatgatgacactttggatgttccaacccaagtggagctgcttatcaagcaggcaacatctcacgagaacctctgccagtgctacattggctggggc

SEQ ID NO: 1698 - DNA, 423 bp, Homo sapiens
ggaaagatggcgtaccttctcattgaagaagacatccgggacttggctgccagcgatgactacagaggatgcttggacctgaagttggaggagctgaaatcctttgttctgccatcctggatggttgagaagatgcggaaatacatggagacactgcggacagaaaatgagcaccgcgctgcggaagcgcctccccagacctgagccgggtgtcctggctactacacttggcggcctgcctccaagaccctctttccccacccggctgaggccatcatggggatttggtctagttgactcttaacagcattaagctgtacatgagctagtttgtagtgactcactgcagagcaccccagactggcatgtggttctgtttctaaagttattggaataagaagcaattaaacagtttgtaataaa

SEQ ID NO: 1699 - DNA, 160 bp, Homo sapiens
caaagtcgaacctcgttctgtggctgtgttcccctggcactccttagtccccttcctggcacccagccagcccgacccctctgtgcagcctagtgaggcccagcaacctgccagccaccctgtggcctccaaccagagcaaagatttaagtaaaaaaaaa

SEQ ID NO: 1700 - DNA, 338 bp, Homo sapiens
  misc_feature (1)...(338): n = A,T,C or G
ctcctgtttggaaatcttacttataccagctgcagcaggaagcccctcaccctcgaagggtcacctgcacttgtgaggtagaaaacagaccaaagtattatggaagagagtatcatggcatgatctctagagaagagactgaccagcctcctgagtgtggctgaggggagcctacctcatccgtgagagccagcggcagccaggaacgtacactttggctttaagntnggnnatanacanncaantntanctgctcagcttntaaaancctctnnatagagggnttnnacanttaagagacanatcacacatgtatggcnacttggtgtcttgtattc

SEQ ID NO: 1701 - DNA, 506 bp, Homo sapiens
  misc_feature (1)...(506): n = A,T,C or G
acataatgcccttaaaggaattccagaacgaccgagatgggctgtttgacacaattcagcgttctaagaatcactatcaaaaaagagcataccagtgtataaaatgtatggtagccctctttagcagttgtcctgttgcttaccaaatcctgcagggcaatggagatcttaaaaggaaatggacctgggcagtggagtggcttggagatgaacttgaaagaagaccatacactggcaatcctcagtacacttacaacaattggtctcctccagtgcaaagcaatgaaacatcaaatggttatttcttagagagatcacacagcgctaggatgacacttgcaaaagcttgtgaactctgtcctgaggaggaaccagatgaccaagatgccccagatgagcatgaatcacctccaccagaagatgctcctttataccctcattcccctggntntcaatatcagcagaataaccatgtgcatggacagccatatacaggcccagcagca

SEQ ID NO: 1702 - DNA, 492 bp, Homo sapiens
  misc_feature (1)...(492): n = A,T,C or G
tgagatgctcatttatgtgcttcaaacggtgtaacaagaaacgattgtgcggacggcataaatgtaactagatctgctgtgtggacaaggagcacaagtgtcctttgatttgtgggaggaaactccgctgtggccttcatcggtgtgaagaaccttgtcatcgagggaactgtcagacctgctggcaagccagctttgatgaattaacctgccactgtggcgcctctgtgatctacccaccagttccctgtgggactaggcctcctgagtgtacccaaacctgtgccaggatccatgaatgtgaccatccagtatatcattcttgtcatagcgaggagaagtgtcccccttgtactttcctaactnanaagtggtgcatgggcaagcatgaggagctcacaattaagaaactttggacttttaaagagactttggacttttgaagtgttggaatttttgaagactttggggggccttttttggagttggact

SEQ ID NO: 1703 - DNA, 298 bp, Homo sapiens
  misc_feature (1)...(298): n = A,T,C or G
caacccaaaattgcaganagggancagcgtggaggcccaggtgaccgacagcgccagtnccgagaccgcagagccgctggacgtagaccatgnggagtgcggtgccgngggcagttctgttcttgntncaccagccnttancaangccgnctccgtggacccagtaantgcaggtaccagaanatactgcngtntataggtganggggangccaaggnaagngacttggngagcnccantgagaanacagaggctaganatgaagacntgntannggctgancagtttgagaggcctg

SEQ ID NO: 1704 - DNA, 254 bp, Homo sapiens
  misc_feature (1)...(254): n = A,T,C or G
gtggtgcaaatatcatgtgcccgggtttaacgtctcctggagcgaagctctacactgctgcagtagataccatcgtggcggtcatggcagaggggaaagagcatgccctgtgtgtcggagtcatgaagatggctgcagcagacattganaaaatcaacaaggggatcggcattgagaatatccattatctaaatgacggnctgnggcacatgaagacatataagtgagccttanacacaatacacctgagctaa

SEQ ID NO: 1705 - DNA, 282 bp, Homo sapiens
  misc_feature (1)...(282): n = A,T,C or G
tggaaacctgcgaacacagccacggccggtgctcccagcntgccttctgcaccgactacaccactggcttttgctgccactgccagtcgaggttttacggaaacgggaagcacntgnctgccanaaggggcacctcaccgagngaatgggaaagtgagtggncgcctccgagtgggtcacattcctgtgcacttcactgacgtggatctacgcgctntacatcgngggcaatgatggcagagcctacactgccatnanccatgtcccacagccggcagccca

SEQ ID NO: 1706 - DNA, 507 bp, Homo sapiens
  misc_feature (1)...(507): n = A,T,C or G
aactgagactgatacctccgacccagnanaggttgtttcagccttcctgaaggtggcatctgtgttcagggatgacgcctcagtaaagaccgcagtgctggatgccatcgatgccctcatgaagaaggccttcagctgctcctctttcaattccaacaccttccttaccaggctgctcatccacatgggtctgctcaagagtgaagacaagatcaaggccatacccagcctgcatggccccctgatggtgttgaaccacgtggtgaggcaggactatttccccaaggcccttgcacccctgctcttggcatttgtgacaaagcccaatggcgcgctggaaacctgctcctttgcccgccacaatctgctgcagacgctatacaacatctagatttaaaggcagctgcttcttgtccctcgccctgccccagtgactgagggtcttggatggactgagctcggccagcatctccattggatattttgaccagaggaagggagagggtc

SEQ ID NO: 1707 - DNA, 501 bp, Homo sapiens
  misc_feature (1)...(501): n = A,T,C or G
gagcggaaggcaggcagattgctgccaacatgagggggattgggatgatgcccaacgacattcctgagtggaagaagcatgcctttgggggcaacaaagcttcttatgggaagaagacccagatgtcaatccttgagcagagagagagcctgcccatctacaaactgaaggagcagctggtgcaggcctgtgcatgacaatcagatcctaattgtaattggagagacagggtctgggaagacaacacagatcacccagtacctggcagaggcaggntatacttnnaggggcaagattggntgnacccagccaagaagagnggcagttatgtcngtgnacaaaagagncncacaagagtntgnttgncgcccnggncacaanangtgggnnacaccattcgacgtcntcgnttgnnttnttcnnnctctctactncnntttcccatcctttgacccnagntttctttctccgtgtncacnatcnttttccttttccgccttt

SEQ ID NO: 1708 - DNA, 272 bp, Homo sapiens
  misc_feature (1)...(272): n = A,T,C or G
caggcaaacgttcctgccctcctntgtggccaaaggaagcttaggtgcagctcctgcanagaggacacagcggataatacaggaagagatggaagtctgcantgaagcagcagggagatatcccagnaactacaatgcntggncccatcgcatctggnttntacagaacgnggncaagctggatctgaagatccttcttgatgaactgtcttctactaaacactggncgtccatgcangcctcagaccaccgcggcattcccactatcgcaa

SEQ ID NO: 1709 - DNA, 324 bp, Homo sapiens
  misc_feature (1)...(324): n = A,T,C or G
gactgagtgtatgttctggggaagatctactgatacaagcccggtggttccacatcctgggcatggtgatgttcttctggtcatccgcccatcagtataaatgccacgtcatcctcagcaacctcaggagaaacaaaaaaggtgtggtcatccactgccagcaccggatcccctttggagactggttcgagtacgtgtcttcagctaactacctagcagagctgatgatctacatctccatggctgtcacctttgggctccacaacttaacctggtggctggtggcgacgtatgnntttttcanccaagccttgtcttgcattc

SEQ ID NO: 1710 - DNA, 497 bp, Homo sapiens
  misc_feature (1)...(497): n = A,T,C or G
ggagaaggtttggggtnaaatactgcaganncnccacagcaggactgggangacattncttncncacagggaanagaantgntntgtcaacctgggggatgnnacctgtccananagcgganacagccaacattctttgnggtggtcctaacanatatngacgtcacnatcagacattacttgntcatgtctancttttctatgaggcagagatcaatctgcagggaacgaagaaggaagagantgaaggtgaanaagtatctgntttaattcaaccagncagaagtatttgcccccaaaagcctggngttggtatccagattagactatccagaaatctttagggcctgcctgggtttgatctatactgtgtatgtggacagcatgagtgtctccttggaaagtctcatcgcaaatctttgtgcttgccttgncccagctgctggagggnctcagaagctattttncttgggtgcaggagacagacaactgatcca

SEQ ID NO: 1711 - DNA, 250 bp, Homo sapiens
  misc_feature (1)...(250): n = A,T,C or G
ttccgtctccccattnngcagccancattgaatacatctgtncctacttgaatcgtntctgntaataagatcagcaccanatgatgtggaatctctcatgagtagactccagcntaccttcagacaggaaatgactggagttggagccagcctggagaagagatggaaattctgtggttttgagggctngaagctgacctgaagctctttgcctagaattagagatcctgaaaataaatgtgtgcttgac

SEQ ID NO: 1712 - DNA, 550 bp, Homo sapiens
  misc_feature (1)...(550): n = A,T,C or G
gactgagctccttgcccgacttgaaggcagaagctcgttgaaagaactagaacccaacctgtttgctgatgaagattcaccagtgcacggtgatatttntgaatttcatggnccagaaggaacggggaaaacagaaatgctttatcatttaacagcccgatgtatacttccaaaatcagagggnggactngcaaatagaagtcttatttattgatacagattaccactttgacatgctacggctngtgacagntcttgaacacagactctcgcaaagctccgaggaagccatgaagctgtgcctagccaggttgttcctggcgtactgcagcagcagcatgcagttactgctcacgctgcactccctggaagccctgctctgcagtcgcccctctctctgccttctcattgtggacagcctgtcgtctttttactggatagaccgagtcagtggaggagagagtgtggccctgcaggagtcaacgctgcagaagtgctctcagctcctagagcggcttgtcactgagtaccgcttgctgctttttgcgaa

SEQ ID NO: 1713 - DNA, 117 bp, Homo sapiens
  misc_feature (1)...(117): n = A,T,C or G
aaaccccacaggcatgnacacccacagnggagagggctgcaaagcctgcaaccagggcgaaggngtggcccagccttgcggagccaaccagaccgngngngaaccctgcctggacag

SEQ ID NO: 1714 - DNA, 513 bp, Homo sapiens
aactgagctgaacaaggcattccaagctgaggtagtctcccgcggtcatctactgtatcagcatgcactggttccgagagtgggaggccttcgtcaaggggaaggacagtgagcctcccgggcccatcgacaacagcaggattgcccaggtcaaaggcagtggccatatccagctaaagcagggggctgactgtggccagatttcggaggagacctggacctatctgagcagtctgtatgggggcggccctgagattgccatccggcagagtgtggcccagctcccagacccagaaagcttgcacggagagcagaagattgaggctgagacccgggctctgtgacttgggccatgctgagttgctgtggctggccctactccctctccagacagcgctgcatccctctgaaggctgtgtcctgctgagtgcccactgtccctgaaggctggtgttcgacattccccagagggtgtgtctgccctgcagctgagctgctgtgtgcctggtacac

SEQ ID NO: 1715 - DNA, 497 bp, Homo sapiens
  misc_feature (1)...(497): n = A,T,C or G
gacctctgctggccgacncgntctggactgctgcagtctgctcaagaggagctgaccaggaaggaggcagctgatccaggaactgcaacacaagttaaaccaggagaaggaggaagtggagcagaagaagaatgagttcagcttgaagatgaggcagctggagcacgtgatgggctctgctaccgagtatccacagagtcccaaaacaccaccccattttcaagctcatttggcaaaactcttggaaacacaagaacaagagatagaagatggaagagcctctaagacttctttgcaacaccttgtaacaaagctaaatgaagatagagaagtcaaaaatgctgaaattctcagaatgaaggatcaattgtgtgaaatggaaaatctacgcctggagtctcagcaattaagagagaaaaactggctcctgcaacgtcagctggatgatgtgaaaaggcagcaggagagtggcgatcagagtcatccagacagtcccc

SEQ ID NO: 1716 - DNA, 382 bp, Homo sapiens
  misc_feature (1)...(382): n = A,T,C or G
agaaaggccccatgatccgtgttggtgttggacgagatggatcagctggacagcaaagggcaggatgtattatacacactgtttgagtggccgtggctaagcaactcccgattggtgctcattggtattgctaataccctagatctcacggacagaattctgccgagacttgaagctagagaaaactgtaagccgcagttattgaacttcccaccttataccaggaatcagatagctgccatcttgcaggatcgacttantcaggtgtcaaaagaccaggttctggacagtgctgcgatccagttctgtgcccgcaaagtgtctgctgtttcaggagacatccgtaaagcgctggatgtttgcaggcgagctatagaaattg

SEQ ID NO: 1717 - DNA, 138 bp, Homo sapiens
cacactctgtgtcgctcagagtctactttaaaggatatccgatggagaggtcattgaggagctgcagtgtcttggaggtgattggctcacaacgaccccagtacttcaagttggtgatgctgaaggacaaaaaaaaaa

SEQ ID NO: 1718 - DNA, 474 bp, Homo sapiens
  misc_feature (1)...(474): n = A,T,C or G
tgagaaggtgaaggtgtggcttcaggagtactggaacgtcacagacctcatcgccatccttctcttctcggtgggaatgatccttcgtcttcaagatcagcccttcaggagtgacgggagggtcatctactgtgtgaacatcatttattggtatatccgtttgctggacatcttcggcgtgaacaagtatctgggcccatatgtgatgatgattgggaaaatgatgatagacatgatgtactttgtcatcattatgctggtggtgctgatgagcctttggggtcgccaggcaagccattctntttcccaatgaggagccatcttggaaactggccaagaatatcttctacatgccttattggatgatttatggggaagtgttttgctgaccagatagaccgtaagcaagttttatgattctcatacnccaaagtcaggtattttaacttcaattgagncacgtcttttccaagt

SEQ ID NO: 1719 - DNA, 118 bp, Homo sapiens
  misc_feature (1)...(118): n = A,T,C or G
tttgggggatcgggtnttcccacctacggtctctgcagtctatagcacggtaacacaagtagcgagacagccaggaccccccacccctgccccttactcagctctgtaaaaaaaaaaa

SEQ ID NO: 1720 - DNA, 307 bp, Homo sapiens
  misc_feature (1)...(307): n = A,T,C or G
actgagccctatgccgtcaatgggaanatctctccccaaagcancgtggactttgacctgaccctcagatgcaggaacccagagtgngggctgcnngacacagtccttctggaggaactaggccaggccanngaccttgntcctggagaggatggattggcangcccgatgtggtgtgctgganagcctncntgtnattaaaanncacttccanncttgganctggtggcagcacgcctgtaatcccancaccttgggangcanagtgagttcnaggacagccanggcntacacagataaaccctgt

SEQ ID NO: 1721 - DNA, 511 bp, Homo sapiens
gaggaactgggcatgttcctgggagagttctcctgccttgctgccttctacctgctcaaatgccaaggcagaagacagtcagcctccagtgtagagccccagcagcccttcaacaccctgcttttcctgcccccagccctgtgtgacatgactgggaccagcatcatgtacagtggccctgaacatgaccagtgcctcaagctttcagatgctgcggggtgcagtgatcatcttcacaggcctgttctcagtggccttcctggaccggaggctggcaccaagccagtggctgggcatcctgatcactattgcgggactggtggtagttggcctagctgacctcctgagcaagcatgacagtcaacacaagctcagtgaagtcatcacaggtgacttgttgatcatcatggcccagatcatcattgccatccagatggtgctagaggagaagtttgtctacaaacacaacatccacccactccaggcagtaggcatcgagggcttcttcttg

SEQ ID NO: 1722 - DNA, 491 bp, Homo sapiens
  misc_feature (1)...(491): n = A,T,C or G
taaaggagaacagggtttggcctggacgggacacagctgagtgagatgccgcgcctggtgccccgngggcccgcctcactgagcagagtcacgctgggccctgctgcaccaccgcctccggccacgccgtcctggagctgcacactgggcaggctggtgtcacccggcccatgcccacggncgtacctggtcatcacagagcagncaaagcagcgtggnatgcgcttccgctacgagtgcgagggccgctnggccggcagcatcctcggggagagcagcaccgaanccagcaagaccctgcccgccatcgagctnnnagactgtnnagnnctgcngnaggtggaggngacgnaatacctgttgtggaangactggccncaccggntacaccnacatacctnttgtggggaaagactgtantaganngcantatgcaggagagcggntgatgnctcatgctcatccctcnggtacagactttaacaaccttg

SEQ ID NO: 1723 - DNA, 444 bp, Homo sapiens
  misc_feature (1)...(444): n = A,T,C or G
taactcaaaggcaccttttngaagnggccacaccgtggaggacctcattatgactggcatcaactncctggacacccgcagcaccttctggaggcagcanaagcccatctatgccagggagcggagaccggaagctgatgcaagagaagtggctgagggaccggaaacgcagcccctcgcagacagcccactacatcctcaagagcctagaggacattgacatgttntngaccagtgncngngctgntgggagcctncaanaagcngagaaagtccttaccaaggttctggaatggaaccaagaggaggtacccaacaaggacgagctggtcnggaactngtacagctgcataggcaacgcccagattgagctggngcagatggtggcttgccttgcagagccaccgaaaggacctggagatcgccaaggaacatgatacttcc

SEQ ID NO: 1724 - DNA, 365 bp, Homo sapiens
  misc_feature (1)...(365): n = A,T,C or G
gactgaggtggggtctttnaagcctttggagaaggtgctactggaagaagggtctgcccacagactggtcgactccccagccacccccatctggcagctgatctccaaagtcctggcccgtcacttcagtgtagcagatgccagcagggtcctggaacaactacagagggattatgacaggtccttgagccgcctaacactggatgacatcgaacgtttggccagccgctttctacaccctgaagtgactgaggctatggaaaaagggttctgcaaatagcattctgggattgtggggagaaatcccaggtcaggccacagctgcatgttgcattaaatgtgttctcatgtcgcaaaaaaaaaaa

SEQ ID NO: 1725 - DNA, 448 bp, Homo sapiens
  misc_feature (1)...(448): n = A,T,C or G
tgagcttcctggagaagagcctgttggaagagtagaaccagtgggccatgcacctttgctggcattggttcacaagatgaacaactgtctcagccaaatggagcaatttccagtcaaagtacatgatttccctagtgggaacggagctggaggaagcttttctctcaacagaggatcacaagctttaaaanttttcaacacacatnagttaanatgtcagntacaaagacacccagactgtgcnanngtgaagcagtggaaaggcgggcctgtcaagattgatcccctggctctggngcaagctattgagagataccttgtggttagaggatatggaagagtaagagaagatgatgaagatagtgatgatgatgggtcagatgaagaaatagatgagtctttggntgctcaattcttaaatnccggaaatgtaaggcacaggctacag

SEQ ID NO: 1726 - DNA, 535 bp, Homo sapiens
  misc_feature (1)...(535): n = A,T,C or G
gagaccgcggctttgagctcaccttcaagnccgcagcatgaccccagcttgtccctcattaagtacggggagttcctctatgacaaccttatcatcttttccccgtcggtggaagattttggaggcaacatcaacgtggagaccatcagngccttcattgatggtggcggcagcgttttggnggcctgccagctctgatattggagaccctcttcgggagctgggcagtgagtgtgggattgaatttgatgaagagaaaacagctgtcatcgaccaccacaactatgatgtttctgaccttggccagcacacactcattgnggctgacactganaacctgctgaaggccccgaccattgttggcaagtnatctctgaaccccattctcttccgaggagttggaatggtggcanacccggacaatcccttggttttggacatcctaacaggctcttcaacctcttactccttnttcccagataaaccaatcacccagnacccccatgcggnggggaggaacactctgctgattgcc

SEQ ID NO: 1727 - DNA, 207 bp, Homo sapiens
  misc_feature (1)...(207): n = A,T,C or G
ctgagatgccaatgtgcgggncaagaagctactctggncccctgccnatcttcanccgcngccagcatgcgcatgtcattgnagacctgcactgcnncctntgcgacgnggacgtgtgagngcgagatnaaaagcgtggtncncgagccanagcgtcccctgcgcacattagacctntcatcacttgtnntttccctaatgaagggg

SEQ ID NO: 1728 - DNA, 452 bp, Homo sapiens
  misc_feature (1)...(452): n = A,T,C or G
ggactattccatggaattttaaaaagctgngaatnnctgggccaaaacctntgcctttcttggggacgattcttgcttaccagaagggcttctgggaatgtgacatacaatgtcataaaaaatatgggaaaatgtgggggtaagtattacagcaacttctactgggtagatttgaaacatttacaaaagctcacaggatcttcagtggaagcaatggtattacaaagatttgtggaggcttttcctatcaaaggccccatatgtcttccagtgtcatgattcacagatggaattttgttaaaacagttgcatgttttgattttctcctggacttgatggttcaggagnggttcacttganntagnccagtgtctggatattccactcttccaacgtnctcttctgcgtatccctctaatacaatataacgaatcactcaagacctttaaaaa

SEQ ID NO: 1729 - DNA, 512 bp, Homo sapiens
gactgaggaccatctcttctgaatcattctttgaggaaaatgagttatcaggaaggaaagcctgagcctgcgaagcaagcccttaagaagtcaaagctgccactcggtcgttttgactcactggaggattcacccgaagagagagagccactgcagaagtttccggatgatgtaaatccagttaccaaagaaaaaggtggacccaagggcccggagcctacacgatatggagactgggaacggaagggacgctgcattgacttttaagtcacgcactctcacaactgcagaatcattacctgaactgtttacttcaagttgttttctttttctgtgtcctttaagtgtgtaatttccatcgtatgtcctaaaatgcatgtgacagctttgaatagcaaatgctgctatagatgaggaatgtggaaacgcttccattagcatcttaacctcaccttaagtgtgtcagggcagagtctgggatgagagcatcaagtctttgccacgatcttttt

SEQ ID NO: 1730 - DNA, 506 bp, Homo sapiens
  misc_feature (1)...(506): n = A,T,C or G
ggagagcagtatttctttacttctgatgtctgctgcctctgaggatgggagttatgaagtggagagcgtccttgggaaggagatgggacctttactctgctttgtccagtccatcactacacagcagagcagctgtgtcgtcaccctggaagagattgagctgctgagtacagagggagccacntgctgctcagcctcctccctgacatctgtgcgcttggcaaggggcntgtgtgttaactcagtgtttctgtttttaaatttagtgggtttcttttctttcttttttctggtaaagagattaataggatagttttaaattaaaaatcaagatacctctaatacacatttttttaaactttaccttcctacaagtttgataacatgtttctttgagtgtttctcatgtcttctgtgtcttcattttgcagctacttgggcttaggaaatgtgctttgttgtagctttaaagtagttacaatttatcaatattatatatgtttccc

SEQ ID NO: 1731 - DNA, 489 bp, Homo sapiens
tctagacgtgctcaagaagttgaaaatgtcctcccggatattccgtagcaattttcccaatctggaaattgtcaccattgcagaggcggagttttaccgacaggtctcaacaagtctcttgttctcctgccccaaagacctggaagccttcaatcctgaaagcaaggagctgttggatctggtggaattcaccaatgagctccagacactgctgggctcctctgtggagtggctccaccctagtgacacgggccatgaaaactactggtgagccacctgccccgcccacccactgtgtacagtgtgttatagtgttaatccttgtgcatatgtgtcataatacaacaatttctgtaaagaaaggacactattacatatgaaaatatctcttctttatataagagaagttactccggtcagaagaacccagaagcccgtgttttctttctaaaattttaagtcagtttttatgaagctgttgaaatgtct

SEQ ID NO: 1732 - DNA, 368 bp, Homo sapiens
tggcctggctgctgcgctctggaggaccttcttcaaccagaaatgtgaggaccctcgacagcttgaattgctggtggagtatgtgaggaaacagatgcaatacctggactccatgaacggtgaggatctgctgctgacaggggaagtgagatggcgccctctggtggagaagaatccacaaagcatcttgaagccccatgctcctacttacaatgatgagggcctttgagagactggtccctccggacagctggctggctggctttgaggaccctccatggaagaagtgcctgtttgccccaggaccctgaagaaggtggcctgaactgacttgtgaacagtacctgttgaatactcaaaaaaaaaaa

SEQ ID NO: 1733 - DNA, 145 bp, Homo sapiens
  misc_feature (1)...(145): n = A,T,C or G
gtagggccggggcagangccntacnnactnnnngacgtacnntcaaatctgaaaagttcgccttccaagctgaagtgaacaggatgatgaaccttatcatcaattctttgtataaaaataaagaggtaagtgttaaaaaaaaaaa

SEQ ID NO: 1734 - DNA, 515 bp, Homo sapiens
tgagagcatacctccttccatgttactgctgatggccaaatgcagcctgttccttttccccccgatgccctcattggacctgggattccccgacatgctcggcagatcaacaccctcaaccacggggaggtggtgtgcgcagtgaccatcagcaaccccacaaggcacagtgtacacaggtggcaagggcatgcgttaaggtgtgggacatcagccaccccggcaacaagagccccgtctctcagctggattgtctgaatagagataactacatccgttcctgtaaattgctacctgatggctgtactctcatagtgggaggggaagccagtactctatccatctgggacttggcagctccaactccccgcataaaggcagagctgacatcctcagcccctgcctgttatgctctggccatcagccccgactccaaggtctgcttctcatgctgcagtgacggcaacatcgcagtgtgggacctgcacaaccagaccctggtgaggcaattccat

SEQ ID NO: 1735 - DNA, 106 bp, Homo sapiens
gactgagatgaatttcctctgctcacaaccaaacgagtgttctggaagggtgttttggaggagttgttgtggtttatcaagggaaacatcatcacctggcctctaa

SEQ ID NO: 1736 - DNA, 317 bp, Homo sapiens
  misc_feature (1)...(317): n = A,T,C or G
attgagctccgtgcagagtacaggctgtccntgaaangtctgtgcgatgactgacagggaggcgtncaccacttcgtggacgtggacatcaaagatgaaatgagggttcttcaggatgttcacccagaaccgaagtgatatggatggtatcctcatctcggatgtcatgcttctctgcctgctcgtccaagaaatcgaagaagtacttgacggcgggtggcaccgcatgcccaggcgccagcacgctttggaagaagttgtccacaaactgctgcagtgtgccctatggaggacagcggcttgatgtgacccccccc

SEQ ID NO: 1737 - DNA, 397 bp, Homo sapiens
  misc_feature (1)...(397): n = A,T,C or G
acacctgaccctggacacgaactgccagtctccagtcatgagcccaaatccagaatcaacacgtgcctccactgctgggcctnangttntgtaacagggttcctacaacacatcngatttaccgggtcatcctgatcctctgagaangcaatgagctcatcttnaagcagcttnccaccgtctgctgactgatcaccgtagtttagnctgantntgnttaaggcatnctgnacaacagaaaacactgnatgagaaaaccccatgcctatgacccgtaggacagaatattcaaaccaattctagtaataaatgactaataaaaaatctgctgtagtatgtaacaagcanaaagngagttattctaaataaaaacatggattgatgtcaaaaaaaaaaa

SEQ ID NO: 1738 - DNA, 520 bp, Homo sapiens
  misc_feature (1)...(520): n = A,T,C or G
actgagccggttgcctcttccgtgactgatcacacaccgaccgcaagcaccatggagtccttcagctcaaagagtctggcactacaagcggagaagaagctgctgantaaaatggctggtcggtccgtggcagcatctctttatcgacgagaccagcagctgaggtgctagacgagcttttaccagcgtgtccaaagaatacacccacagccggcccaaggcacagcgggtgatcaaagacctcatcaaggtagcggttaaagtggctgtgctgnaccgcagtggctgctttggccctggggagctggctctggctacacgatttcgtcagaagctacggcagggcgccatgaccgcacttagcttcggtgaggtggacttcacctttgaggctgccgtgctagcaggtctgctcgtngagtgccgggacattctgctggagctggtggagcaccacctcacacccaagtcacatgaccgcatcaggcacgtgtttgatcactactctgaccccgaaaaa

SEQ ID NO: 1739 - DNA, 477 bp, Homo sapiens
  misc_feature (1)...(477): n = A,T,C or G
gaggaagaccgagcggcancaatctgaattaacagtaacacagttgaaggaattgctgtaaacagcagcagatattattggagaagaagatgttaggtgaagactcanatgaagaagaagaagcaaataccactgaagggaagagcagtagaagtggtcaagatgatgagatgggctgcaccgtggggaatgggagaagatgcntgtggaggatgaagctgaagagaaccccattgccttagattttcagcaggaccgggaagcgttttatataaaggatccaaagaaggctcttcaaggcttctttgaccgagaaggagaagagttagaatatgaatttgatgagcaaggacacagcacttggctctgcagggtgaggttacctgtagatgattcaactgggaaacagctggtggctgaggccattcactcaggaaagaaaaaggaagcaatggtacagtgctcgctggaagcctg

SEQ ID NO: 1740 - DNA, 144 bp, Homo sapiens
  misc_feature (1)...(144): n = A,T,C or G
acatctggatttggacgcgatccaacatggaaggtgtatactccanctggacaagaanggagacgtcatttnaacgattctgtggcacgantggnggagcctatactaatttgtgatagactatcaaaataaatatttttaaca

SEQ ID NO: 1741 - DNA, 279 bp, Homo sapiens
  misc_feature (1)...(279): n = A,T,C or G
tgattctgagaaagaanaggtgaaagtgggagataccttggatctctcactggagagaacaaagagacaggaacagaggtggtgatgcgaattctcctgaaaaaggtctatgaagagaagactgagaacgacaagcaccgggtggtgttgcgccgatggaagagcttaaagctgcctaaaaagactctgtctaaataaacatcacttctcccacanantgnctnctaattgtcanggggtgggggagcctancaagaggacgtttttattaaaaaaaaa

SEQ ID NO: 1742 - DNA, 138 bp, Homo sapiens
  misc_feature (1)...(138): n = A,T,C or G
tgctcattacatcctttncacagcgatgctnacanactgnaatnctacacttgacaggctgagtcaggaggattgtgagcccctgaactatgtatgaccaggaaactttgcctcagaaaaaaagaaccaaaaataaaa

SEQ ID NO: 1743 - DNA, 129 bp, Homo sapiens
  misc_feature (1)...(129): n = A,T,C or G
gactgtagggcaggaagccgnggtgaccaggctcgaggactggtgcttgaaaatgagggcgcccaggggagangcntaccnggcnngcctnntgacangaaaatgaggnggncccacatgtctgtgcca

SEQ ID NO: 1744 - DNA, 605 bp, Homo sapiens
  misc_feature (1)...(605): n = A,T,C or G
aaaaccagtaatcatactgccaagggaagcntcatnngcntcaccntctnnaaanncntttggagnctcttgtnagaagnagaanaaacagctcacccactancantacctgcaananggggcannagnccnncgaggcatgaatgacagctggantattgaccngnaaaantttaggaaaccaggcagaggaagacctttacacagngtagccgtctctttgtnngnnntcttccccctgatatcactgaggaggaaatgaggaaactatttgagaaatatggaaaagcaggcgaagttttcattcataaggataanggctttggctttattcgcttggaaacacgaaccctagcggaaattgccaaagtggagctggacaacatgcccctccgtgggaagcagctgcgagtgcgctttgcctgtcacagtgcatcccttacagtccgcaaccttcctcagtacgtgtcgaacgaactgctggaagaagccttttctgtgttcggccaggtggagagggctgtagtcattgtggatgaccgaggaaggccctcagggaaaggcattgttgagttctcagggaagccagctgctcggaaagctct

SEQ ID NO: 1745 - DNA, 149 bp, Homo sapiens
  misc_feature (1)...(149): n = A,T,C or G
ctcatagaagccctaacctttgccntggcaacagctntnnctttcctcaggnttctggangaaacgctcacattggaagaagcagatttgaagaatgctgtaatcattcagagactncaaaaaactgccgagccttttaaaaaaaaaaa

SEQ ID NO: 1746 - DNA, 146 bp, Homo sapiens
agaagggccaggtgtcagcatttctgaagagagacaaagtgtcaccgagaactctgggacaaccatcatttacaatccctacgctgccctttctatagagcagcagcggcagaagctgcccgtgttcaagcttaggaaaaaaaaaa

SEQ ID NO: 1747 - DNA, 142 bp, Homo sapiens
gactgaggtgaccccatctctggtgttcgccgtgactgttgccacgatcggctctttccagtttggctacaacactggagtcatcaatgcacctgagacaatcctaaaggactttcttaactacactttggaaaaaaaaaaa

SEQ ID NO: 1748 - DNA, 145 bp, Homo sapiens
  misc_feature (1)...(145): n = A,T,C or G
tgaacttgcccattgnagntnactnggatttctacatgcagaacacaccnggattacctcagtgcggnataagagactntgccaaagctgatatcctttttgatgctataatgattgnctttcattgattctaataaaatacttt

SEQ ID NO: 1749 - DNA, 149 bp, Homo sapiens
  misc_feature (1)...(149): n = A,T,C or G
aggtggagagtcccctaaatcccagctgtaagatnttgaccttcagacattccatggaggagtttcgggagttcaacaaatacctcgcatacntggaatccaaaggagcccatcgngcaggtcttgccaaggtgattcctcctaaggag

SEQ ID NO: 1750 - DNA, 111 bp, Homo sapiens
  misc_feature (1)...(111): n = A,T,C or G
agcggtaaccatgactactgaagttggctctgcatctgaagtgaagaagggctctgaccaggctggagcagatgcctccanggagaaagctaaagaagtagaaaaaaaaaa

SEQ ID NO: 1751 - DNA, 422 bp, Homo sapiens
  misc_feature (1)...(422): n = A,T,C or G
agatggggtgatcctggcctatctcatcgagattgttgcangagaaaagcttgactgnagtgcngnatgagtcccaataaccaacaagagatgaattagtcatgcggnnagggtccttcagtttgtgncttncaaaaagattgggnggngtcanacgtcancnaaagatattgtggaaggaaacctgaannccatcatgaggctggtccttgccttggcagctcattttaaacctggctctagcaggacagtgagccaggggcgagactccaaagcccccgtgcagagtcatcaaccacactgtgccaccgctgtggcccaaggagccgctgctgctctggctgatgtgtgccatgacgtgtcacggtcaggacggggattgtcttccgatacagacagaggaacgccagcgtggatggaga

SEQ ID NO: 1752 - DNA, 141 bp, Homo sapiens
accctgaaaagaaccgatacttccgtttgctcccgggtcacaacaactgcaaccccctcacaaaggagggcatccagcaaaaggagatggagagcaggaggctgcagctgctgcagcaagaggacatgcagaaaaaaaaaa

SEQ ID NO: 1753 - DNA, 145 bp, Homo sapiens
  misc_feature (1)...(145): n = A,T,C or G
taataggaagtcttaccnnatagaaaccctatgaatatactcaatgtggtaaagcctctacacgtcacattggtcttcaaaggcatgaaagaattcatactggagagaaaccttataaatgtaatcaatgtggtaaaaaaaaaaa

SEQ ID NO: 1754 - DNA, 524 bp, Homo sapiens
  misc_feature (1)...(524): n = A,T,C or G
tgagggacatagagtaaccanctattttgcattcctgnncnatgaagcagcgtggggtcacncgttgctccagccacagnggcactgnntccnctcnngctacnggcaggaacacaccggtccttttctttagtgtgctgcgttgtcctgtattcagnacanancaatgagnanagcnactnngatcatctgacgtgnngcnttgntttttggncanantgangtcaggatccaatggtgaggaccatatcccgttgccatggngatgattgtgctgtcacaaatttagtgtggcttcaaagcgaagagaaacagatggtctggaaaagattgaagggctgtggttagcacaggcaatggcaggatcagccatttcaggtgcattttggaagaagatagaggcataaatgacaagccaagggcctttatgaaagccattgagcaagaaagaactcatccagataaaactccaaagcatcttccgtgagagggaaacctcggatacctttaaacctagagtgggc

SEQ ID NO: 1755 - DNA, 542 bp, Homo sapiens
  misc_feature (1)...(542): n = A,T,C or G
aaccctgttacctggccgtncgagtagtaaantgaagaagggcnngngcgaggtgaccgangtgancaagcttgatggggaggcatccatcaacaacaggaaaggcaaacttatcttcttctatgagtggaccntnaaactgaactggacaggtacctctaagtcaggagtgcagtacaaaggacatgtggaaatccccaatttgttctgatgaaaatagcgtggatgaagtggagattagtgtgagccttgccaaagatgagcctgacacaaatctcgtggccttaatgaaggaanacggggtgaaacttctgagagaagcagatggaatttacntnannaccctcaagacagagtanactcagggcatgatcttgcccacagtgaatggagagtnattanatccagtggnccantcnnccactaaagactgagactntgcaaggctaagtctgctnctttaanaantcccaggccanaaccntngntggtgtcnaaaaatncccactntggnaanancacccctttaaaggaaacccttt

SEQ ID NO: 1756 - DNA, 310 bp, Homo sapiens
  misc_feature (1)...(310): n = A,T,C or G
gactgagatttcctctgctgcctgtggctatggattcacattgctgtcctcgaaaaccaaggatgntacaaaagtctggggcatgggactcaacaaagattcccagctgggattccacaggagccggaaggataaaagtaagcaggngctggngagatggctnagnggttaagagcgccnactgctcttccaaaggttntgagttcaaatcccagcanccacatggaggctcacaaccatccgtantgaaatctgatgccctcttctggantgtctgaagacagctacagtgtacttataataaataaat

SEQ ID NO: 1757 - DNA, 126 bp, Homo sapiens
gactgaggacatgcccaggatcctgccatggtgcatctgccaggtggccggtttctgatggggacagacgctccagatggcagagacggtgtagggcctgcctgggaagtgacagtaaaaaaaaaa

SEQ ID NO: 1758 - DNA, 105 bp, Homo sapiens
gaaacttgaagcttctgcatagggtggttcaccgcggagtgcatcgtgcggttcatcgtctccaaaaacaagtgtgagctcgagtcctcatggcaaaaaaaaaaa

SEQ ID NO: 1759 - DNA, 438 bp, Homo sapiens
  misc_feature (1)...(438): n = A,T,C or G
gactgagggagaaacagtanangcnccggacctcaaaaaatgttctacatantaacntntggaaccactctccanctctnaccagcagctccnaggggcccangaggtncaaggggagcgatngantgcgggagaagcgcacacccagcgtcccngnggacaccgnagcactggatgcanacatcactcccacaangagcctggatgcccttctcantccttncaagagggctccctgtntgcagtgctagctcatnggnnaggagcactgnctcttnttnacaagatggagatctcggttnccagaacccacgtggcagctcactgctttctgnaaccccanntgttggggacccaacaaaaatatcantacacataaaataganataaancattaagagggttccctgncatnaanagggttccctgaaaaaaaaa

SEQ ID NO: 1760 - DNA, 223 bp, Homo sapiens
  misc_feature (1)...(223): n = A,T,C or G
cagtaaaaggaccaaatgactgactcaaaatanttcaccacaaccaagaaaggggagatctttgagctgaaggcagagcttaacagtgacaagaaggagaagaaganggnggncnnggngcnngtgattgcntcaatgactgtgggcaaagatgtcagtgctctcttccctgatgtggtgaactgcatgcagacngacaacctggagcttttgaagctggtgt

SEQ ID NO: 1761 - DNA, 381 bp, Homo sapiens
aactgaggcttgccattcagatgtgacctcatggctccctgctgctgccatgcctgccacttttatgcctctgaaactgctaggaacagctgctgaccacttccttctgatagtacttgtcggaaataactggcaaaacagaagcaccgtttcctggctgctttcctgcttcctgaattggatagtccactgcttagccagtttcctttaatgtgtcactgtggtcctggattctctgttgctttctctcaaggaagcgagcccgtgcatctgatatggatttgtcatcatttctcctttgcattttctttagaacttcttttgatattccatctgaaaatagtataaatataccttattttcaacattaagaaaaaaaaa

SEQ ID NO: 1762 - DNA, 559 bp, Homo sapiens
  misc_feature (1)...(559): n = A,T,C or G
gactgaggagtacttttgaggaaacagggtatttttatttncagattacnctgcatgaanatggttcatcagtgctgaggactaantgnccnctgntngtgatacagtgaaagnattctanannnatattcccttggactttatgagaaaataaaagtcntttnnctctattanaggaggatcctgatggtgaaagagggatcgagcatttcctggaaccatctccctgacccggaggttttccggcagcgcttcaggcaatttggataccaggattcaccaggacctcgagaggcggtgagccagctccgagaactttgccgcctgtggctcagaccagagacacacacaaaggagcagatactggagctggtagttttggagcagtttgttgccatcctacccaaggagctacagacttgggttcgagagcatcacccagagaatggagaggaggcagtggctgttctagaggacttggagagtgagcttgatgaccctggtcagccggtttctctccgtcggcagaaacgggaagtgcttgtagaagagataacat

SEQ ID NO: 1763 - DNA, 370 bp, Homo sapiens
  misc_feature (1)...(370): n = A,T,C or G
actatacagcaacattttactgctgtgtttaaccaaagtttgaggctgtgggactttttgaatcatatgatctcctaaagctgttcacattgttcaatttatttttatattaaaacttggganngtatggntnnnggcttagtggcaaaanccgtgtttcttctgggaaacctattacaaagcntcagnggancaagaatatntaaacatgcacntgctggatgtntcanatanctttcatggcnttttggcctnactctttgaggnccactaaggaccnngcngctgtgcgaacacngagacantgccccaatctctctgctcagtgntctgntcactagctctggaggaggaccagcaaaggcaggct

SEQ ID NO: 1764 - DNA, 603 bp, Homo sapiens
  misc_feature (1)...(603): n = A,T,C or G
aactgcacttcaccaatggcaatggggagcagcgttccagcctccgtctctatttataatggtgacatgggaaaaaatactgttggtatgcccagcatgaatctggacgaagtagctccaagtagttctcactgtgacagcccacctcgctcccagncaccacaagataccaacagtagctgaaatagacagccacagctttggcgagaaaaacagcactctgnctgaggaagattatattgagagaagaagagaagttgaaagtatcctgaagaaaaactcagattggatatgggattggtcaagtcgaccagaaaatattccccccaaggagttcctttttaaacacccgaagcgcacagctactctcagcatgagaaacacaagcgttatgaagaagnggggaattttctnagcagactttctgaaggttttccttccatctntggtactggctcatctgctggccattggcttggggatctacattggaaggcgtctgacaacttccactancaccttctgatgaagattnggatctgacttctgttcacacagngaggattcatgtctgagctgngacagctaattggaagagctagc

SEQ ID NO: 1765 - DNA, 215 bp, Homo sapiens
  misc_feature (1)...(215): n = A,T,C or G
ctagaactcagtcttntgcgcaccctcccctcatntgtaaantatgtctcttgacncctggtattcacttcatccntgtnccangatancatanaaagtngcaggccgggngggggacgactctatggtggactacttctttnanaggcancatggtgagcagctntgggggaggaggaagngntgnaggcggcctataatactagcaaacatcg

SEQ ID NO: 1766 - DNA, 213 bp, Homo sapiens
  misc_feature (1)...(213): n = A,T,C or G
gtgcttataccagcanagccgcctgtcagntttttctcctagagatctncggtccttgacctcttccaggggcagctggactatgntgaccatgnacgccaggatncctgaggtggtggtgctgatcttctatgccccgtggngtggccagnccatcgctgncagggnagaaattgagcaggcagtcagccaggntttctgatcaggtgttgt

SEQ ID NO: 1767 - DNA, 367 bp, Homo sapiens
  misc_feature (1)...(367): n = A,T,C or G
cgctgcactgcaagccaacctgcctgtggagtnctggccgtcgtngatgtcaagccacgattgcnnagagctntaggntnttctggtggngagatgaacccaacctatgaggtgagnaatacatcatgaactgcaggntgntggaagaangactctgcgaaaatggcctttcctatgaatgtncgacgctgnctcttcaaagcaatccacactctgtnanaaaggtgcctaatgnataanaacttcntgcggatngngaagtggtttgtgccggccctatgacaaggatgaaaagccagtcaacaaaaggtnantacttcnngntgcctgtacgcctccctcctcagcacgaggccgcagcatgcct

SEQ ID NO: 1768 - DNA, 283 bp, Homo sapiens
  misc_feature (1)...(283): n = A,T,C or G
tgagtgaccggacctcaaaactnactcggaagatgctggcctccaagcacacaccatggaggcggcttcagggcatttccttcggaatgtattcggccgaagagctcaagaagttaagtgttaaatccattacaaatcctcgatacgtggactacctgggaaacccttcagcaaatggcctgtatgatttggctttgggtcctgcagattccaaagaagtatgcgctacctgcgtgcaggacttcaacaactgctctggacacctgggcctgaaaaaaaaaaa

SEQ ID NO: 1769 - DNA, 478 bp, Homo sapiens
  misc_feature (1)...(478): n = A,T,C or G
tgcactgtacacctgcagcacctgcacgccagagggagaagagcccgcagggatttgtctagcttgcagttacgaatgtcatggaagccataaactgtttgaactatacacaaaaagaaattttctgttgtgattgtggaaacagcaagtttaaaaactttggaatgcaaattatttcctgacaaatcaaaggtaaattcttgcaataagtacaatgacaacttttttggattatactgcgtttgtaagagaccttatcctgatcctgaagatgaggttccagatgagatgatacagtgtgtggtctgtgaagactggttccatggcaggcatnttggtgccattccccctgagagtggggatttccaggagatggtgtgccaggcttgaatgangcgctgntctttcttgnggnnttatgctgcccnnttgncagtaaccaggatatctgctgaanangatgggctgctgccaaatg

SEQ ID NO: 1770 - DNA, 171 bp, Homo sapiens
tggagaaagagaaggaacgcacaattacctcagcaaagaggaaatcaaagagaaagttcataaatacaattcagccgttacagacaagctgaagatgaccttaaattccaatgggatctacactggcttcattaaggtgcagatggaactctgcaaacctgcccagcccta

SEQ ID NO: 1771 - DNA, 264 bp, Homo sapiens
  misc_feature (1)...(264): n = A,T,C or G
ttaaccggtacgaacgatcccttgcagccctctgcagcctgcacagcatcaggcaagatcggtggtgcccanaaccgcaactacagtaagcatgctgtgtggnctgctgtccgatcgcctgcacatcagcccggaccgggtctacatcaactattacgacatgaacgctgccaacgtgggctggaacggttccaccttcgctngagtccnggccccacttacctgcaccgctggtctttgagcctcgctccacgtagtgttctg

SEQ ID NO: 1772 - DNA, 146 bp, Homo sapiens
  misc_feature (1)...(146): n = A,T,C or G
tccacgccagcgtccacccgtcacggccgccacncanagcgatgtcacccacgagagcgcacacgtagacgcggacgccgcggtcaagatgtctccgccatccccacgggacggacggacggacggactncacaaggaaaaaaaaa

SEQ ID NO: 1773 - DNA, 553 bp, Homo sapiens
  misc_feature (1)...(553): n = A,T,C or G
gactgagaggagactttgactggccagccgcctgcattgagctggagcagcacctggcccgctgggcagaggatggactgcgaaccgagtacttctgcctggctgatggccactttgcttccattgatgcggtgttgctgctccagggtggggcactgtgtctgtcaggcatcccgggatcagaaatgtcaacctgtgggacctgcgccatctagggaaggatcccagccgagttctggtgaaggccttaggcacccagggcaatagcacacacaagggcatgggtatggtcgctagcagcgcaggaccaccgtgtgtgctccggctcttgggacagcactgtgaagctgtgggacatggcggctgatgggcagcagtttggagagatcaagggcaaggcggcanngctgngcctttcctaccnacctgatatcctggtgactggtacctatgacaagaaggcgaccatctatgatcccagagctggcttgcccctgntgaaaaaccggaggctgcactcaagcgcggtgctancagtgctggcagatgacag

SEQ ID NO: 1774 - DNA, 127 bp, Homo sapiens
catagaaacgtgttggaagcaactggagtcaagtaagaggaggtttgagcgggactgtaaggaagccgaccgggcacagcagtacttcgagaaaatggacgctgacatcaacgtgaccaaggcggtt

SEQ ID NO: 1775 - DNA, 266 bp, Homo sapiens
  misc_feature (1)...(266): n = A,T,C or G
tgccacacaccactggcgaggntggnggctggntnttatacngaggngaatgacagggcggntcaccagcctgctgctgnnggtcaccaccnaggcagaagtcccatcagccatggctgcggtgaagacgatgttacanggactacactggnacagtcacacnagtcacnggtccagagttcaaattnnangaaccacatggcggcntcacaaccatccgnnncnagatctgactccttaattntggagtgtcttgaaggacagcc

SEQ ID NO: 1776 - DNA, 173 bp, Homo sapiens
  misc_feature (1)...(173): n = A,T,C or G
gactgagtggcaggacagctttgcaaatgagccgagntctttctatccaacttccccggcccaatcagaacgtggtgagaagtcgaagcaagacttaccccaagagggtagcacagactcagcccactggatcaancaacatcaatcggataactgcaaacacaggaaaacgg

SEQ ID NO: 1777 - DNA, 558 bp, Homo sapiens
  misc_feature (1)...(558): n = A,T,C or G
gactgaggacaccacgacgtctgtgcgcattggcctgatgatggaggagatgatcttcaaccttgctgacacacacctgttcttcaatgacctggaggactgtgaccaaatccacgtggatgatgtctcatccgatgacaatggtcaggatttaagcacatacaacttctccactgatggcttccacagcacaggcngccaggagccagcttgtgcctgggtacaggtgttcatggcggtgtggactggatgaggaaactggccttccgctaccgtcgtgtgaaggagatgtacaacacctaccgcaacaacgtgggtggcttgataggtgctcccaaaagagagacctggctgcagctgcgcgccgagctggaggccctgactgacctctggctcacccactccctgaaagccctcaatctcatcaactctcgacccaactgtgtcaatgtgttggtcaccaccacgcaactgatccctgcattggccaaggtcctgctgtacggtctgggctccgtgttccccatcgagaacatctacagtgcgaccaagacttca

SEQ ID NO: 1778 - DNA, 363 bp, Homo sapiens
  misc_feature (1)...(363): n = A,T,C or G
tgaatatagtggtcagctggtctgctggctgcccgggcccagcacagcaaggtggcccagacgcaggctggggaagcagctggaggttggacgggccaggagagtttatcagacagtgaccctgagatgtgggagcttctgcagagggagaaggacagacagtgtcnccggcctggagctcatcgcctcagagntagnangtgaggatatggntcanagagcgcanagctacggtgcgcgcagggaacaccacgtcacctgngntcacaggnagtgaattntncacgcntngnctgncngantganaagaccnntttccnggccctttcnccctccctctctatactgcactcatgaagccga

SEQ ID NO: 1779 - DNA, 333 bp, Homo sapiens
gccaccatacaggcgatgccaaaccaggcagacaggatgaaactttgatgtgcaaagtcggaggatctgaggtgacccttgtaggtgactgccccctcaccacaggctgaagagggacctgtaaggcagctgccgacagtccgacagtccgggggcgcccaggaacatagcatagctgctttgatggtcttgtctcctccccctggaagactgggattccaggggatcaactccttgagacactgagggcccaagccaaagacctgggaacaggtgggttcctggccaagaagcaaaggagaagccatggcgcctgtgccctccaggcctcag

SEQ ID NO: 1780 - DNA, 499 bp, Homo sapiens
  misc_feature (1)...(499): n = A,T,C or G
gactgaggctgaggcttaggagatgcctgggnctaggaggccaccctctcaaagcaaaaggaaacggaggtgacagacgtcgagaccactgaagggaacccatggctaggatcagtttttcctacctctgcccagcctcctggtacttcactgtgcccacagtgagcccgtttctccgtcagcgggtggcattcctgggactcttctttataccctgtgtccttttacttcttttaatcatggatttacgacactgggccacttcgttaccacgggacaggcagtatgagaggtgatgcgttggaaccatannacngcangaaaccttccgnntgcnttnnccagcannntntgnnctattggcngacattgnacttntacaaatggcngtaagttcaataacntgtggccattaccttangnnaacccccatgacttgctggacatcaaaacagatgagagaccggaacagccagcccgtggttaagaaaataaagcc

SEQ ID NO: 1781 - DNA, 179 bp, Homo sapiens
gagacctttggcgacgtggctgtgcacttctctcgagaggagtggcagtgtctggattctggtcagagggccctctacaaggaggtgatgctggagaaccacagcagcgtggcaggactagcaggattcctggtctttaagccggaattgatctcccggctggagcaaggaaaaaaaaa

SEQ ID NO: 1782 - DNA, 504 bp, Homo sapiens
gaggcgctggtcagatgcagacggtagaagaagggatgaagatgtgagcagggatcaggagccccaggaagtaggagcaccccaggaaccaatactgggttccaaatcggaagatctcagctggtgctcccaggatggccaccggctgactggaaggtggccagcaaggacagtgccacaggaagacagcccattttgcggtctgccatcagcagttcaccaacggtatggtggccccagccacgacaagcatgatagagcccaatgacaagggagaggaccagcaacaggccaaataccacatagtccacaacagaaaaggtagaaatagccccgctggagcctgaggttgtatggaagggagctgcagtgctcgccacactcatcctcacggtgctgatgctttgcagtgacttggtactcctgggctctgagctgtcacgagatggttcctcgttcagtctcacagcgttcctcttctacccagtgacatggtccaggggc

SEQ ID NO: 1783 - DNA, 395 bp, Homo sapiens
  misc_feature (1)...(395): n = A,T,C or G
caggcaagctctctcctcggacctccataggcagcaaaggaaccaggcccattccccgggaccatggttggacttcagncctccgaagcgcctcccacaanggntgtgaagttcctgggggccggcactgcggactgttttgcggacctcctcacttttcccctggacaccgncaaggtccgtctgcagatccaaggggagaacccnggggctcagagcgtgcagtaccgcggtgtgctgggtaccatcctgactatggtgcgcacagagggtccccgcagcccctacagcggactggtcgctggcctgcaccgncagatgagtcttgccttcattnnaattggcctctacgactctgtccagcnantnctacacccccaagggagcggaccact

SEQ ID NO: 1784 - DNA, 263 bp, Homo sapiens
  misc_feature (1)...(263): n = A,T,C or G
gtatgcctgggcagcagccatanttacttcttgnggnactctnaanggncggncaggaagcatggntgnntccataacncnaaggctgctaaagatntnanggatgatgctgctgccgccaccaagagctttcctgatcacttttncagagagggngangatcaaatggactttganggggtcatnttttcttnctcaccagttttagacctgagtcnnggaggcctgcgccatttgggaaagttctttaaaattcccaacct

SEQ ID NO: 1785 - DNA, 208 bp, Homo sapiens
gtttgaggacttctgtttcctgctttcccacgggctggcggcctgggaatcaatttggcttcagcggacacagtcgtcatctttgactctgactggaacccgcagaacgacttgcaggcacaagcccgagcacatagaatcggtcagaagaagcaggtgaatatttaccgcctggttacaaagaaaaaggaaaagaaaagaagaaaaa

SEQ ID NO: 1786 - DNA, 483 bp, Homo sapiens
  misc_feature (1)...(483): n = A,T,C or G
tgacatcatgttgaaaaacatagctgatgaccttnggaagtgcttgcctgtagaagctgtgctttgctcggaacatctggcccttcagaaaatacgacaacagccagagcccacagtgcatgttgatgcattcctttatgatgaagactttattgatacattatgtgaggaaggaaaaatgagcanaaactactgtacngtgtgcggntcacaccgaacagcgcctttgggatttatttctcactccttctccctcacggagttgaagttcatttatcatcatgtactccctgatctgtcaggaaaggtcttggttgacgttggctccagacttggcacagtcctttatgggggttacctttacagntcagcanagcaactntgtggngtagagctgaatggacaattttgccngntgcangaaatgatcataaagaaataccagttcggngacagaataaaggtgcttcatgcagacccccc

SEQ ID NO: 1787 - DNA, 367 bp, Homo sapiens
cagctctgacgaggcatctgaaacagaggaggaggaagaggagcccagcgtcgtcatcatggggcgatgaggagtttcagcagtcgtgagcccagctcattctgtgaccagcctcagaagagaaatggctgtgtgtgaccagctgctagactggctgtgttgggagaaggcaggcacctcctgcagccctgcctgcctggggagcagagggagcagaccttagacatttgcagattgcattctgtatcctgccctgctcttgctgaaggggagtgagtgcttcaccttccccgggtgccgttcccttctgcttgaacagcagtgagctctgcgctggtttctgtgaagggaatatttatttagtaaa

SEQ ID NO: 1788 - DNA, 399 bp, Homo sapiens
  misc_feature (1)...(399): n = A,T,C or G
agtagctgaggatggagagactcgggaggaaantcttcttcaggagtctgcatccaaagaagcttactatctaaacaagatcttggagatgcagaatgagctgaagcagagccgggctgtggttacaaatgtccaggcagaaaatgagaggctctcggccgttgtacaggaacntgaaagagaacaactgagatggtggagctacagagaatacgaatgaaagatgaaatccgagaatataaattccgggaggcccgactccttcaggactacacagaattggaagaagaaaatatcacattgcacaaactagngcccacattgaagcagaaccaggtgagacttaagatttntaaaanattataccacanatggattcacatgttctaataaatgagg

SEQ ID NO: 1789 - DNA, 236 bp, Homo sapiens
  misc_feature (1)...(236): n = A,T,C or G
tctgcttgcactggcctgnaaaggccaagaccaaggggctgnanagnggagtggacattggagttaagtattcngagaaacaggagaggaactttgacgacgccaccatgaaggccggccagtgcgtcatcgggctgcagatgggcaccaacaagtgtgccagccagtctggcatgacagcctatggtaccaggagacatctctatgaccccaagaaccatatcctgcctcccatg

SEQ ID NO: 1790 - DNA, 268 bp, Homo sapiens
actgagctcctggagcctgtctgccccaactgtttgagctctatcgtagctctgaagttcgacttaagaggttcacactgcagttcctgcccgaattgatttgggtttatttgcgacttacagttagtagagacaggcagagcaatggctgcattgaagcacttctcctaggaatttataatttggtgagttgaaagcgatagtttagaaattttaaaatatttttaaaccctctgaaatatttgaagattgtttaaagaaaaacaaa

SEQ ID NO: 1791 - DNA, 401 bp, Homo sapiens
actgagggcaagatcacctgtctcctgagcagaagaaatcactatgattagtattcagcttgctgctaggttcctttttactacaggatttcacacaaagaaaatagtccgaggatctgccagtgattggtatgatgcattgtgtattctcctgcgtcacagcaagaaccgtgccggttttggtttgcctcacaatgtcctttttaatgtttcaaatcgattctctgagtaccttttggaatgccctagtgcagaagtgagaggtgcatttgcaaagctcatagttttcattgcacatttttccttacaagacgggccttgtccttcaccttttgcatctcctggaccttctagtcaggtaattgtacctttgtttatatatgtatttacaaaaaaaaata

SEQ ID NO: 1792 - DNA, 349 bp, Homo sapiens
  misc_feature (1)...(349): n = A,T,C or G
atttcaatgattcacngcgacaggccactaaggatgctggccagatatctgggctaaatgtgcttcgagtgatcaatgagcctacagctgctgctctagcttacggtctggacaaatctgaagataaagtcattgctgtgtatgatttaggtggtggaacctttgacatttctatcctggaaattcagaaaggagtgtttgaggtgaaatctaccaatggggacacctttcttaggaggggaagactttgaccaagctttgntgcggcacattgtcaaggagtncaagagagagacaggngttgatttgaccaaagacaacatggcgcttcagagggttcgggaagctg

SEQ ID NO: 1793 - DNA, 237 bp, Homo sapiens
  misc_feature (1)...(237): n = A,T,C or G
aagtcaaaggaagcccaaagggaggtcatttctacagttcaaagtctgagatactcagagcaatgcaacgtgcagatgaggccttaagtaaagacacggctgagaggctgcagctggcagtgtgtgatgagccttcagagccggaggaggaggaggagacagaggtcagtcactccattctcttaggggggaaggaggatatgatgtgtatgtgatgaagngagaaataataaaaaa

SEQ ID NO: 1794 - DNA, 532 bp, Homo sapiens
  misc_feature (1)...(532): n = A,T,C or G
agccagagtggtttgccatggtcctcnggggtggcaagaaggatgacaaggtcaataccatgcaagatctgannggtccatagaatctgccttaggtctcggcgagttctgtatggnaccacaacgctttaagaagccaagccgatgtagtgatcttgnnnaccttgnntacangatgcataaccggnttcatttttaaagaacagtattgccctgagttaatgntttttaaacatgaacattgaggaagttttaaagtagatcanctataagtgtttaacttactgaggtgtgagaagtgcctcacctcccaaacttancaaataanncaattttgaccttggnctacttactgnncnanngngtncacatctgngggctcaaaacactacatcagcatcctgncgtttgtagacaaggatctgctggaaccaggctgctccgtcctgctcaaccacaaggtgcatgctgtgataggggtgctaatggatgacacggatcccctggncacagtgatgaaggtggaaaaaac

SEQ ID NO: 1795 - DNA, 514 bp, Homo sapiens
  misc_feature (1)...(514): n = A,T,C or G
actgagctgcttggagctggagataagaagattttcttggggagctgatgaccactgagtttgatacagttgtggaagatgggagtctgccccaggtgagccaacagctacagaccatgttccaccacttccagaagggtgatggggcgtgctcttcaggagatgacctctcanatcaaccaaaaaaagtgcaaagtcacggctaccccacttatgacagccaaagaaactgatgtggctgaagatgatgtggacagcgtggaagaaatggaggtgacagctactaatgatggngccacaactgacgaggtctgcccacagnctcaaccctctgatccanacncccagactattaaggangaggatatagntgaagacggttggaccattgnccggagaaagaaatgagcagggcagtccatgttttgggccctcgtttgntaaatgttatgagacttatangagctgtttgggggctatacacctntgttctggaaaccataacccttctttg

SEQ ID NO: 1796 - DNA, 380 bp, Homo sapiens
  misc_feature (1)...(380): n = A,T,C or G
actgaggcttgacccaactctatgtagccaaggatgactgcttggattccagggctcctgttacctgcgcgtgctgacnggcaggtgtcggnagcctgaatttggagganctgagngagatgcgttatggcatccagatcttgccgttgctctgncatgggaggncanagccaagcttcanacgtggnggttgtgtcttcaaagtacaaacagcgctatgagtgccgcctaccagctggagctattcacttccaacgtgaaagagaggaggngnncccngcntncaaaagannnnggagaggtgcacngttgncccnnaggagntntgccccntctgangnaanaaccacttgcctgtgcctgtacaggtccacccaccc

SEQ ID NO: 1797 - DNA, 495 bp, Homo sapiens
  misc_feature (1)...(495): n = A,T,C or G
gccactgccggtgcgctgggnccngacctaagntccaaccagaccnacttagtcctgctagtttggnaagnngnggagccgnagcagacgacaggtggaggacacgtgcacannnatgctagttcagcgcngaggctggnttgcccttgagnccanatntgccgagcagnngngtggacctcancncaaacngactancgngcacggattccctggncaaantgctgcaacagttntcacnnntgannagcgncncatttggctctgctgggcgggggcccctatgtgctctgcactgatgggcagcagctgttgcngacaggttctgcatcctgaggcctccaggaagaacctggtgctncccgacaccttcttcttcttctacnacctncgcagagaattncatatgcagnanccaagcacctgctccgccagagacctcacagtgggcaccatggcacangacttgggactanaaacagatgctaccgaaga

SEQ ID NO: 1798 - DNA, 349 bp, Homo sapiens
  misc_feature (1)...(349): n = A,T,C or G
tggctcagacccattgtgatgatgaagaaccgcagatccatcactntggagnancatgaaagccananntatatgtnnantaaagaggccaacgccatccttnacttccgacctggatatncnanagggtctggtatacntnacactctgcatagcgttcctgangactctgcaagcccnccgctgnacatggntccaggagtatatcaagtacnttcantgataanaccatcgatgaggagctgganccanacangagggtnactgggattgtggagtntcttngccaactggntctancgattgccaatcctttgctcccatctangngagacttgacaccttaagc

SEQ ID NO: 1799 - DNA, 317 bp, Homo sapiens
  misc_feature (1)...(317): n = A,T,C or G
ccccactggcctcaantttttnttcatgaataagccctcagatggnangnccaagnatntggtgntnaatgctgacnagggagagccaggcacctgtaaggaccganagatcatgcgtcatgaccctcacnagctggtggaaggctgccttgngggaggccggaccatgggagcccggnccgcctatatctacatccgaggggaattctacaacgaggcctccaatttgcaggtagctatccgagaggcctatgaagcaggtctgattggcaagaatgcttgtggctccgactatgattttgatgtgtttgtggtgc

SEQ ID NO: 1800 - DNA, 271 bp, Homo sapiens
  misc_feature (1)...(271): n = A,T,C or G
ctgggcctcatagccacgggcatgtttcagttctggcctcactccattgagtcctccagtgatgggggtgtggagaaacgcagnatcagggaggtgcccgnggtnaggcctgcccactgacagccccatnccagagcggggggatctnagntgtanaatgcatacntgttnncgatgtctaccgntgcggcttnacccaangaacaanattaaggngtacatctacccnntaaaaaagtatnccgnatgangctcggtgttccggtgagca

SEQ ID NO: 1801 - DNA, 514 bp, Homo sapiens
  misc_feature (1)...(514): n = A,T,C or G
gactgagggaagaggatggtgcactatttgttcccagacgggaaggaaatggcagaagaatatgacgagaagaccagtgaactccttgtgaggaagtggcgtgtgaaaaatgccctgggagccttgggccagtggcagcttgaagtgggagagccagtgccctcaggagctgggagcctgggatccgagctcatcaaagaaagtaatgccaatcccatcttcatgcgcaaggacaccaaaacaagtttccagtggcggattctaaatctcccctacccgaaggatgtgtatagtgtgtctgnggcccagaaggagcgctgcgtcattgttagaacgacaancaaaaagtactacaanaagttctccatccctgacctagacagacaccagcttcctntagaggattctgcgttgagctttgcgcacgccaactgcaccctgataatctcttatcanaagccaaaggaggtcatggcggctgagtcagagttacagaaggagttaaagaaggtaa

SEQ ID NO: 1802 - DNA, 408 bp, Homo sapiens
  misc_feature (1)...(408): n = A,T,C or G
acatgggcaaggttctggaaagttctctgtggaggtcctcagattttgggacaacctacaccaagcttactctccagcctggtgncaccacntgtcattgacaacttctatatctgcccagctaacaaaaggaagcatttgggagaaagagaaactgtgtccaagaatcaccaagaaggggccacctcatcacatccatgtgatgacagatgcttccaccccctcaccccgaggatctgctgctcaagaaggggctactaccaccagcttggnattgggagctgcagccttcagccttcccagagtaaagaaacccttanatnaggggttctcaacctncctaaagctgcagcccttttaatacaagtncctcatgttgcggnatgcccanccataataacttcatgg

SEQ ID NO: 1803 - DNA, 514 bp, Homo sapiens
  misc_feature (1)...(514): n = A,T,C or G
gagtcaggatgtttcatatgtaacagcagccnngagggaaaactcgtccttacttactcctgcagccaaaaagctgaaactaggacattaaggacanagaaggagaagaagcagaaggtggacgaagatgagattcanaagatgcaaatcctggnctcttctttttctgaggagcagcatgaaccgttatgaaatgtatcgnaggtcagctttccccaaggcggccattaaaaggctgatccagtccatcactggcacctctgtgtctcagaatgttgngattgccatgtctggcatttntaaggtttttgtcggggaggnggtanaagaagccctggacgtgtgtgagaaatggggagaaacgccncccctgcagcccaagcacatgagggaggccgnccggaggttgaagtccaaggggcaaatccccaactcaaagcacaagaagatcaccttcttctaaatctaagggagactgttccagacttctcagagtcgggcttctgcccccaac

SEQ ID NO: 1804 - DNA, 507 bp, Homo sapiens
  misc_feature (1)...(507): n = A,T,C or G
gcgtgtgggcttttgatttggtacacgatgtggtggagcaggagctgcagaaggaggctnatatcatccacggagtcatgaacctgcttatccgcacgctggaagagtcaacagaacagatcaggctgaaccgctctgccaagtacaatctggaaaaggatttgagggataagttcacggccataactatcgatgacgtntgcttctcactcaacaatanctcaccaaatatcaatttttctgagaaggttgtgagaatcgagcccaactcagtgagnctggaggactggctggacttctccaatgccaatgtngacaaggcnnacnnacagctgaacaattcaacggcgctgaagaccctggtggaccanatcctgtcccagacngccantgacctgcgcagacngtgcgaagnggtagacgaggcattcataaatgggctgaaggagaccaaggatgccaggaacaagctgactgatcatctggatcaaggttatggatagaaat

SEQ ID NO: 1805 - DNA, 510 bp, Homo sapiens
tgaggctctcatcttcctgggtctgctgtggagtttggtggccacacttctgggttcaaagtggcctgaacctgtattcgggcgcctggtgtcccctggcttcccagagaagtatgctgaccatcaagatcgatcctggacactgactgcaccccctggctaccgcctgcgcctctacttcacccactttgacctggaactctcttaccgctgcgagtatgactttgtcaagttgagctcagggaccaaggtgctggccacactgtgtgggcaggagagtacagacactgagcaggcacctggcaatgacaccttctactcactgggtcccagcctaaaggtcaccttccactccgactactccaatgagaagccgttcacagggtttgaggccttctatgcagcggaggatgtggatgaatgcagagtgtctctgggagactcagtcccttgtgaccattattgccacaactacttgggcggctactattgctcctgcagagcgggctg

SEQ ID NO: 1806 - DNA, 510 bp, Homo sapiens
  misc_feature (1)...(510): n = A,T,C or G
gactgagacttacaacagcctgtgccangctttgcataaaccaagtagacagtatgtctaacaagcactgctatgaagactgaaaattgtgtggccaaagccaaacttgccaatggcacttccagcatgattgtgcccaagcagcggaaactctcagcaagctatgagaaggaaaaggagctgtgtgtcaagtattttgagcagtggtcagagtctgatcaagtggaatttgtagaacaccttatatcccaaatgtgtcactaccagcatgggcacatcaactcctacctaaaacctatgctgcagagggatttcataactgcactgccagcacggggtctggaccacatcgctgagaacattctgtcatacttggacgccaagtcactgtgtgctgctgagctcgtgtgcaaggaatggtaccgcgtgacgtcggacggcatgctgtggaaaaagctcatcgagaggatggtcaggacggactctctgtggcgaggcctggcagagcgc

SEQ ID NO: 1807 - DNA, 421 bp, Homo sapiens
  misc_feature (1)...(421): n = A,T,C or G
cttgctgcgggccacatgcacnnggaagaccngcggactgccatactacttatggcacatggntgccgntacggaggagaannaaacctgangcngaaggagnctgtntnacngaagcatgcacctgncctgtnanaagggcaacgtggtcctggctcagctgctgatctggtacggagtggacgtcatggcccgagacgcccacgggaacacagcactggcctatgcccggcaggcctccagccaggagtgtattgacgtgcttttacagtatggctgccccgacgagcgctttgtgctcatggctaccnctaacctgtccaggaagagcaacagcaggaacaacagtagcgggagggcgcccagtgtcatntgagctcagccaacactacacctgggatnccacacccacctgcttcca

SEQ ID NO: 1808 - DNA, 428 bp, Homo sapiens
aactgaggttagcgacccagagagcacagtagcagtggccttcacacccaccatcccacactgcagcatggccacgcttattggcctctccatcaaagtcaagctgctgcgatcccttccccagcggttcaagatggatgtacacattacacccgggacccacgcctccgagcatgcagtgaacaaacaacttgcagataaggagcgagtggcagctgccctggagaatacacacctgcttgaggttgttaatcagtgtttatccgcccgctcgtgagcctggctttggacccccagcctgcactcaggttgtcctggcctcagctccaccaagggctcatggctttgttttcttgaatcactgacaaggagaaacttaacactttttattttgtaataaacccttaatttatattcaaaaaaaaaaa

SEQ ID NO: 1809 - DNA, 471 bp, Homo sapiens
  misc_feature (1)...(471): n = A,T,C or G
agcgggatgacaggaaggacaggagtgtnattcgcctacactttcagaaggtccaggaagccatcaaccaaggaacaggtttntggcttnannagngntgngcatcgaccnnntagncntnangcgtacgtgatganctggnaggcttnangcttatctcntgccgagnaagaggntctcncatgcnttgtacgngtntttngaaaacnctgcaccananaccatngntaccgattttnccncccttggcgtatggagccannagantcacancctttatcccagacaccaaaatctcctgctcaacactcatntctatgaactcaggagcctcagcatgaataggagcaaatctgtaaggttcagggaggaaagggtcagaaccaggcaccatgctcaaaagccactggccaccacaaacagtcaagtctaatcttgttcaagttaagctgtcacagaacatcatctctc

SEQ ID NO: 1810 - DNA, 479 bp, Homo sapiens; identical to SEQ ID NO: 59
  misc_feature (1)...(479): n = A,T,C or G

SEQ ID NO: 1811 - DNA, 420 bp, Homo sapiens
  misc_feature (1)...(420): n = A,T,C or G
tgagaaggggagtgtgtttgcctacagtgtcactctggntcctctttgtttatattgaagcagcaattagatttaaagatctgaaaaactttcatgtagacctttgtcgaccgtttgctgctcactgcattggataccctgtggtgactttgggctttggcttcaaaagttatgtgagctacaaaatgcnggttaaggaagcagaaggaagttcagaaggagaacgagttttacatgcagcttcttcagcaggccctccctccagagcagcaaatgttgcagaagcaggagaaggaggctgaggaagcagccaagggattgccggacatggattcctcgatccttatacaccacaacggaggcatcccagccaacaaaaaactgtccacaacgttgccagagatagaatatcgagaaaaa

SEQ ID NO: 1812 - DNA, 263 bp, Homo sapiens
  misc_feature (1)...(263): n = A,T,C or G
gacatgcactacatcaaccgaaactttgaccgaactgggcagatgtctgtggtgatcactnccgggggngggtgtntttgaagagnaccgnctactcatgatcttgaccaagcagcggatgattgataatggaattggtgaggacattagnnngcatgggagagcacnccacctacatgctgtgccattattcacagctacataaccggagtgttnngagggattctngantgggtgannattataatattcctcactggata

SEQ ID NO: 1813 - DNA, 545 bp, Homo sapiens
tgaggagccttttgtggccgatgaatacattgaacgtctcgtgtggagaaccccaggaggtggttctaggggtggacctgaagcttttgatcctaaaaggttattagaagaatttgtgaatcatattcaagaactgcagataatggatgaaaggattcaaaggaaagtggagaaattagaacaacagtgtcagaaggaagctaaggagtttgctaagaaggtacaggagctccagaaaagcaaccaggttgctttccaacatttccaagagctagatgagcacattagctatgtagctaccaaagtgtgtcaccttggagaccagttggaaggggtaaacacacctaggcaacgtgcagtggaggcacagaaattgatgaaatactttaatgagtttctagatggagaattgaaatctgatgtttttacaaattctgaaaagatcatcctcattcccccagccaccaagtccacgccttttctttctcactcattatgatatcagcaggcatctaaaatgattataataataaaataattataat

SEQ ID NO: 1814 - DNA, 544 bp, Homo sapiens
  misc_feature (1)...(544): n = A,T,C or G
gactgaggtcgggactgcttgggctgtgcaaaacaggaagtggcaagacagcagcctttgtgcttcccatcttgcagaagctgtctgaggacccttatggcatcttctgcttggttctgacacccaccagagagctggcctaccagatcgctgagcagttccgggtgctggggaagcctctgggtctgaaggactgcatcattgntggtggaatggacatggtggctcaggcgctggagctctctcggaagccacatgtagtgattgccacccctgggcgcctggctgaccacctgcgcagttccaacactttcaacatgaagaaaatccaattcctggtgatggatgaggccgacaggctgctggagcagggttgcaccgacttcaccacagacctggagaccatcctggcagccgttccagcacgaaggcaaacgctgctgttcagtgccacgctgactgacacactcaaggagctgcagggcctggccaccaacgagcccttcttttgggaggcacaggccacagtccgcacagtggagca

SEQ ID NO: 1815 - DNA, 488 bp, Homo sapiens
  misc_feature (1)...(488): n = A,T,C or G
gatagagcagctgcatcggaggntcaagcagctaagcggngaccagcccaccattcncaaggagaacttcaacaatgtccctgacctggagctcaacccgatccgatccaaaatcgtccgtgccttctttgacaacaggaacctgcgaaagggatccagcaggtcgtggccgatgagatcaacgtttgaggacttcctgactatcatgtcctacttccggcccatcgacaccaccctgggcgaggaacaggtggagctgtcacgaaaggagaagctgaaatttctgtttcatatgtatgattcggacagngacggccgcatcaccctggaagagtatagaaatgtggtggaggagctgctctcgngaaaccctcacattgaaaaggagtcgnntcggtccattgcagacggggccatganggaagcgggccagcgtgtgcgtgnngcanatggaaccnggaccaggtgtacgaggggatcacctttga

SEQ ID NO: 1816 - DNA, 547 bp, Homo sapiens
ttgagataccattcatctcagctacagcataccagcaggactgcaaagacaagccagtggacaacaaaagaagcagaaaagaccagcatcatccagcgccagcgcatgtccattaggattccccatgcatctcggagatacacaaggcccctttgagcaccatccatctgaagtgtgctgtggccgtcttttgtgaccatcctccggtgtctttgactcaggagaggagcattcactttacaattactgctgtccatcgcaggctgtgtttctctgaaacaagagggaagtgttagcccgtagctgatttagagttacattcatgagttatgacactttctcagtgtctacatgagagcagttactgctcaagtcatttgttaaccaattatatattagtttaggatattttttatactttccttgattgactgtaccatttgatactttgttttctaaatatattttagaataccagagggtgaggcttataatttgtgctttctaaaacaacctacttgttgtctttgtaaaaatttaggccttc

SEQ ID NO: 1817 - DNA, 549 bp, Homo sapiens
gactgagacggattctgtttccggtatgacagcagttccacatcatcaagtgatcggtatgattccttgctgggtcgctctgcttcatacagttacttagaagacagaaaaccttacagtagcaggctagaaaaggatgactcaactgacttcaaaaagctttatgaacaaattttagctgaaaatgaaaagctaaaagcacagcctacatgatacaaatatggaactaacggatctaaagttgcagttggaaaaggctacccagagacaagaacgatttgctgacaggtcacaattggagatggaaaaaagggaacgaagagctctagaaagaagaatatctgaaatggaagaagagctcaaaatgttaccagacttaaaggcagacaaccagaggctaaaggatgaaaatggagccttgatcagagttataagcaaactttccaagtaggacaggaggcagagaagcaaagcagcaggacttgcacactccccagtggaccacagtggcagtcactggacgccggaggaaagaactcacgggagact

SEQ ID NO: 1818 - DNA, 491 bp, Homo sapiens
gcttcgctgtgaaggtgacaacagccagtgtgaaggagcggagagagattctcagtgaactggggcgatgcatcgccggcaaagatctgccagagggagccgtgaaagggctctgcaagttgttctgcttgacactgcatcgatacagagacgcagcctctcgcagagccctgcaggcagccatccagcagctggccgaggcccagccagaggccaccgccaagaacctcctgcactctctccagtcttcaggggtcggctccaaagcatgtgttcccagcaagagtagcggctcagctgccttgctggctctgacctggacctgcctcctagtgcgaattgtctttcccctgaaggccaagcggcaaggagacatctggaacaagctggtggaggtgcagtgcctgctgctgctggaggtgctgggtggctcccacaagcacgctgtggacggtgctgtgaagaagctcactaagctatgaaaaaaaaaa

SEQ ID NO: 1819 - DNA, 376 bp, Homo sapiens
tgagggcgagatcctttcactgtcaacccagcaggaggaaaaggaacaagacgaggtggaggctggcgctctggatgaaggggcaccaagcgaagcgacagagctcacagagggcgtgccggcacagccccccgtgcccctggagcccgccccagggactacaacaccgccacctccgccaccaccagaagaggaggagagccctgtacccttgctgggcggagcgctgcagtgtcagatccgcgggatcccgggcctcgacatggaagacgacgaggagggcggtgggggtccataacccttacccggcagggctcccgtggccgaggctggaagtccagcctaataaagtgctttcccatctgaaaaaaaaaaa

SEQ ID NO: 1820 - DNA, 519 bp, Homo sapiens
  misc_feature (1)...(519): n = A,T,C or G
tgaggattcccgaggncattagtacaggcagaagccctggccggaatctgtgatgtggacctagtaatcagtttgaatattccttttgagacacttaaagatcgtctgagccgacggtggattcacccttctagcgggagggtctataacctggacttcaacccacctcaagtgcaggggattgatgacatcactggtgagccacttgtccaacaggaagatgataaacctgaagcagttgctgccaggctaagacggtacaaggatgcggcaaaaccagtcatcgaactgtacaagagccgtggagtgctccaccagttttctgggacggagactaacagaatctggccttatgtttacacacttttntccaacaagatcacacctattcaatccaaagaagcctactgagcctgccatgggaagaaccaagaagacgtggtcgcccactcgatcacacgtgtcgtcttggtgacctggcccagttagaagccagctgagatagcttgcagcatcttt

SEQ ID NO: 1821 - DNA, 288 bp, Homo sapiens
gagcgaaagaccagcggcccccccaagggtcccagcaaagcctctagtgtcaccacattcactggggagcccaacatgtgtcctcgatgcaacaagagagtgtacttcgctgagaaggtgacctctctgggcaaggactggcaccggccctgcctgcgctgtgagcgctgctccaagaccctgaccccaggcgggcatgctgagcacgatggccagccctactgccacaagccttgctatggaatactctttggacccaaaggagtgaatactggtgctgtgggcagc

SEQ ID NO: 1822 - DNA, 245 bp, Homo sapiens
  misc_feature (1)...(245): n = A,T,C or G
gcctggtgcagaactgcctgtggactctgcgcnntnnctnggatgtagncancaagctngaggncctggagagtgcgcgngaagatccntggccaaccaactgagagtagatgacgncaangtcctcacctgtgccangggcaccctttncaacctgaccngcnncaacagcacnaatcaagacgcnggtagacacaanaacagtggcngnggaggctgctcatccacccatcctgaaagccgga

SEQ ID NO: 1823 - DNA, 352 bp, Homo sapiens
  misc_feature (1)...(352): n = A,T,C or G
gggggcttttcgggcagaaacactcccgctcagaatncagntcntccacgacgaagtctgcaggtgcccaccgcattaccagctctcctcctcttacgagcaccgacactctgcctcctgagccgggccataccttcgaatcctccccgacgccaaccccngaccacgacgnggagaccccgaatgagcctcctggcctttcccagggccgagcttcttccccgcaggtngctccccagncgttgaanaccgcgttgctgnagaccttgacgcactngggcgacanctcaacagcnntgggccctctgcgcnaccagctgncgaccctgaaccagcacgtggagcatcctac

SEQ ID NO: 1824 - DNA, 304 bp, Homo sapiens
  misc_feature (1)...(304): n = A,T,C or G
ttgtgggcccagccagacaccatttccctgaagatgatcccgcgcatcgactacgaccgcatcaaagnccgaatgagcctgaaagactggtttgccaaaaggaagaagttcaagcggcctccacagaggctctttgatgcagagaagatcaggtccttggggggtgatgttgcctctgatggtgacttcctcatctttgaggggaaccgctacagccgaaagggcttcctgttcaagagctnngccatganntgctgtgattacagaaggtgngaagcccacactgtcagagctggaaaagtct

SEQ ID NO: 1825 - DNA, 463 bp, Homo sapiens
  misc_feature (1)...(463): n = A,T,C or G
acaactgcctgttacttgactcacaccaacccccgagtggatgcgattgtccttgagaaccttcacctgaatagccactgttcaggaaactacaaaagggccccgatactngtccctctattgaatcaaaggttttacgttntccaaatcgtctgcatcaggtttggttggagcctgaaggaatggattccgacctcatctacccgcaagggttatctgttacactgccanctgagttacaggagaaaatgataacatgcatcagaggcttggagaaagccanaatggttcacccaggctatggngngcagtatgattatttanacccccanncacacaattatnttnattgntactcnctantgntcnggaaccataactgtnaatatcnanaattcangncnnnnnggtcnntcgtntaaaccntgnanctnactancccgcatcacttagcagagttttg

SEQ ID NO: 1826 - DNA, 497 bp, Homo sapiens
  misc_feature (1)...(497): n = A,T,C or G
accaggcagcgggcaggtgtttgtgacctcgganaaccagcttgtgtactaccccagcatcacgtacgccatcatcggcagctctgtcatcttcgtgctggtggtggccctgctcgcactggtcctgcatcatcagcgaaagcgaaacaacctcatgaccctccctgtgcaccggctgcagcatcctgtgctgctctctcgcctggtggtcctggaccaccctcaccactgcaacgtcacctacaatgtcaataatggtgttcagtatgtggctacccaggctgaacaaaatgcctcggaagtaggctctccaccctcctattcagaggccctgctggaccaaagacctgcatggtacgaccttcctccaccaccctattcatctgacaccgagtctctgaaccaagctgacctgcctccttaccgctcccggtcaggaagtgcctacagtgccagctcccaggcagccagcagcctcctgagtgtggaagccagca

SEQ ID NO: 1827 - DNA, 336 bp, Homo sapiens
tgagcatcagccctctccttgctgccttcctactcaaggtcagtctgagctgaccctgctactgaagatccaggagtattgctatgacaacattcacttcatgaaggccttccagaaaatagtggtgcttttttataaagctgaggtcctgagtgaagagcccattctgaagtggtataaagacgcacatgttgcaaagggcaaaagtgtcttccttgagcaaatgaagaagtttgtagaatggctcaaaaatgctgaggaggaatctgagtctgaagctgaagaaggtgactgaattttgaaacaacatcctcagtaaagcaaacaggagttgta

SEQ ID NO: 1828 - DNA, 397 bp, Homo sapiens
  misc_feature (1)...(397): n = A,T,C or G
gactgagaaaaagaccttctaaatccagtgtcaagaaaaaattaaccaaagttgcagaagcaaaaaaagnaatgaaaagaagttttaaagtgaacaagaaaataacatttactgatgaaggggagttggttcagcagtggccacagattcagaaatgtgctataaaagatgtggaggaagaagatgacactggtggtatcaacctagacaaagcaaaggaaaggcttcaggaagaggacaaatttgacaaagaagaatacaggaagaaaattaaggcaaagcaccgggaaagacggctaaaagaaagagaggccagaagagaagccaacaaaagacaagcaaaggccagagatgaagaggaagcctttctggactggagtgatgaagatgatggtgg

SEQ ID NO: 1829 - DNA, 353 bp, Homo sapiens
  misc_feature (1)...(353): n = A,T,C or G
agcacagcgattccgaggactccntaaagtcggagagcagcgacagcgagtaccgtcagcgatgaggaacagaagcccaagaatgagcccgaggaccccgaggacaaagaggggagtcgggtggacaaagaggcccctgccatnaaaaggaagcccaaacccacaaaccaggtagaggtcaaagaggaagcgaagagcanctntnctgtcagngagaagccggaccccacacccgtcaaggacaangccagcccananccttganaaggactttgtcagagaaagcnaagccatcacctnatcccanaaaggacaaacctganaggaaaggattnacacggattctcccacag

SEQ ID NO: 1830 - DNA, 538 bp, Homo sapiens
  misc_feature (1)...(538): n = A,T,C or G
actgagggagctagaagattcatctgggtgaagatttaaagggcattctttcagaagcaccggggaagtgtgtgccttatgctgtcatcgaaggagctgtgcggtctgttaaagaaacactcaacagccagttcgtggaaaactgcaagggggtgatccagcggctgtcgcttcaggagcataagatggtgtggaaccgaactacccacctttggaatgactattccaagatcattcaccagaggactaacactgtgccctttgacctcgtgccccacgaggacggcgtggctgtgtccgtgcgagtgctgaagcccctggattcagtggatctgggcctagagaccgtgtacgagaagttccacccctctgtgcagtccttcaccgatgccatcggccactacatcagtggcgagaggcccaaaggcatccaggagacagaggagatgctgaaggtgggagccaccctcacggggatcggtgaactggtcctggacaacaacgcttgtccgcctgnagccccccaagcagggcatgc

SEQ ID NO: 1831 - DNA, 537 bp, Homo sapiens
gactgagatctatctaaaaacagactggtggaagtgccaatggagctgtgccaatttgtatcactggaaattcttaacctgtatcacaactgtatcagagtcattcctgaggccattgttaatttgcagatgttgacccacctaaacttgagtcgaaatcagctgtctgccctgcccgcctgcctgtgtggtctgcctctcaaagtattaatcgcaagcaacaacaagctcggatcactgcctgaagagataggtcagctcaaacagttaatggagttggatgtgagttgcaacgagatcacggccttgccccagcagataggccagctgaagtctctgcgggaactcaatgtccgaagaaattaccttaaggttttaccaccagagctggtagatcttcccttggtaaagtttgacttttcctgcaacaaggtgctggtgatccccgtctgcttcagggagatgaagcagctgcaggtgctcctgcttgagaacaaccctctgcagtcccctccagcgcaggtgaggatctgcctt

SEQ ID NO: 1832 - DNA, 466 bp, Homo sapiens
  misc_feature (1)...(466): n = A,T,C or G
ttgtggtgtctgagacaagcactacgcagctcactttgctgaccctgacaccttagtcaactgggactttgtggaacaagtgcgcatctgtagccatgaagtgccatcttgcccaatatgcctctatccacctactgcggccaagataacgcgctgtggacacattttctgctgggcatgcatcctgcactatctttcactcagtgagaaaacctggagcaaatgtcccatctgctacagctctgtgcataagaaggatctcaagagtgttgttgccacagagtctcgacagtatgctgtgggggacaccattaccatgcagctgatgaagagagagaagggagtgttggtggccctgcccaaatccaagtgggtgaatgtagaccatcctattaacctaggagatgancagcttcanccagtattccaagctgctgctggcctnnaaggagcaggtgctgcaccg

SEQ ID NO: 1833 - DNA, 253 bp, Homo sapiens
  misc_feature (1)...(253): n = A,T,C or G
gtacacacctgcagcggnctcacccncgncaccacctactccatacaccgttcgctgcctactaccactaaggggggtggtgcccgaagcaagcccaaggtggttactacaaacaggggcagtcccaggacggcccaccatgatggtcagcaccacggncatgcncaccgggctgctgcagtggcaccccacccaaggagctnnntggagagnctgttggggttaccnnttttcnaataaccggggggggccc

SEQ ID NO: 1834 - DNA, 442 bp, Homo sapiens
  misc_feature (1)...(442): n = A,T,C or G
cccaccgtgtggtgcgtatttctcacgaacctacncgcgctgaagccnacataagaacgataggagcagcagncacagttgcacgagacagatccagtcgcgagagctccatgatganaaccccgccgcaacatcagcancaggcaggagccaaaggccatcgcgtgacgncgtgcacggggactgggcggagtcaggggcggagcctaagtgggccctgacactcctaaggattccgcgctccctctgncggtcggacccaccnaggacctcctacaaggcctctggagggaggtgctacaaaggaggcagntaatatttnatntgaccttggttactaagtanggangaattganaaaactacaantggataaccaccatcccctcagcccggcccgtgtttgtcttctgcgacaaaaggcttatgttttatcttttaag

SEQ ID NO: 1835 - DNA, 535 bp, Homo sapiens
  misc_feature (1)...(535): n = A,T,C or G
actgaggacgactcactggtggtgtggaaggaagttgacttgacccggctatctgagaaggaacgtcgagatgccctgaatgagattgtcatcctggcactgctacagcacgacaacatcattgcctactacaaccacttcatggacaacaccaccctgctgattgagctggagtactgtaacnggagggaacctctatgacaaaatccttcgtcagaaggacaagttgttcgaagaagagatggtggtgtggtacctttttcagattgtttcagcagtgagctgtattcataaagctggaatcctccatagagatataaagacattaaatatttttctgaccaaggcaaatctgataaagcttggagactatggcctagcaaanaaanttaattctgagtactctatggccgagacacttgtgggcactccatattacatgtctccagagctctgccaaggagtaaaatacaatttcaagtctgatatatgggcagttggctgtgtcatttttgaactgcttactctgaaaagg

SEQ ID NO: 1836 - DNA, 501 bp, Homo sapiens
  misc_feature (1)...(501): n = A,T,C or G
cacctgccgatctcccgaggcttgctgtttactgactctacagccacnacgaaggtnccctcnggangcatgccatanttttctctgacatccntgatgtaccccaggcatngggcatggaggtgaccatggnacctggcaaaggacccagctttccagagccattaagagaagagcgggacttatantttttacgggatccagcagcagcggcttcagagttaggctatgtgttccaagccatcacccttactcgacaacggctggccggacgtgtgccactaattggctttgctggtgctccgnggaccctaatgacatacatggttgaaggcggcagttcaagcaccatggctcaggccaaacgatggctctaccaaaggccacaggccagtcacaagctgcttggcatactcactgatgttctggtcccatacctaataggacaagtggctgctggngctcaggcattgcagctctntgagtcccacgcaggacata

SEQ ID NO: 1837 - DNA, 326 bp, Homo sapiens
  misc_feature (1)...(326): n = A,T,C or G
actgagggttagttagaagaccaaggtctccctgagaacctgatagtaagcaatggtggcgactctagtttcccatgcaggaaagcaaagaaacgggcttttaagttgatggaggatgaggagacagatcagggatacaagtcttcgaagaagcactgcaagaggcaggaggacagccggccagaatgagaaggcctcggacctggaaactaaactcctcccagatgagacggggcggacaaagagcaagaaaaagagcnnagtgacaggcagcccagccgaagaggacgaggaagagaccaaaaagaagtcttcaaaaaaaaaaa

SEQ ID NO: 1838 - DNA, 414 bp, Homo sapiens
  misc_feature (1)...(414): n = A,T,C or G
agaactacacagcccatggcatgcttggagagaactatggttagttgtgattcagagaaaagaactgcaccaagacactagccttgaacaagacatgaagatcatgcntgaaagtacctgcatggatggaggatgtgatctcaaatcggaattgcagctgcccactcacatggtcagttggaagccggcggccaagtgtgtagctgaccaccctatccctagaaggaaataagcaccatcacagattctgtaatgacctctcctgctaatgagcacacaatgtgttttctacaccagctggtgggacaggcaatctcagagaagccattgtaacagggagtgaaggtccctctggggtcccatcttaaggtacagatgtaggatcaataaagagattcttatcaaacattctaa

SEQ ID NO: 1839 - DNA, 383 bp, Homo sapiens; identical to SEQ ID NO: 60
  misc_feature (1)...(383): n = A,T,C or G

SEQ ID NO: 1840 - DNA, 182 bp, Homo sapiens
  misc_feature (1)...(182): n = A,T,C or G
catggttccctgcggtcggtgctcaatanggagtctcattcaccctttgggctggactcattcaactctactgcaaaagtctctccattgactccaaagctttttaacagcctgttactgggtcccactgcctccaacagcaaaactgagggttctagtcttcgagacctccttcactctgg

SEQ ID NO: 1841 - DNA, 411 bp, Homo sapiens
  misc_feature (1)...(411): n = A,T,C or G
aaacgaaaggtctccagcctggccttgcagatgtccctttattttaactcttactttttcccactgtggngggtgagctgcattgtgatgctgcacctgaagtattccatcttgcctgactactacaaattcattgtggttactgtcgtcatcctcataaccttgattgaagcgatccggttatacctgggctgcatgggtaaccttcaggagaaggttcctgagctagctggcttttggcttctgagccttctactgcagtttgcctttaatcacttttcttgctccttaatgatggcctaaggaatctgcccctggagaaagcaatacatatcatcttcaccatctttcttactttccaagtcatctcagcatttctgaccctaaagaaaatggtcaaccagctggcag

SEQ ID NO: 1842 - DNA, 405 bp, Homo sapiens
tttgagggagctgaatttgaagactggttattcctccacacgtccccacaaacaggcaagcaggtcttaccagaagcattgctgaagtcccattgggtctcgataagtgaatggacatctctggaaacattctgtcaatgcggctgatcacgtcatcgacatacctggttgtggaagaagtatacaagtatgaacttggagttctgtcggaggctggaagacttcacttcatacttaataaccaacttttagttggtgtgacaccttttgaagaagacaagatcacaaggtccctcatgaaaacatctcctttttcctcccatgaccctttgcagaggggctctgttttacgtgattatatttatactgtaaataaagtgcctgaatgcaccctaaaaaaaaaaa

SEQ ID NO: 1843 - DNA, 548 bp, Homo sapiens
  misc_feature (1)...(548): n = A,T,C or G
cttccgacagggtgtngccctccagtaccttggacgtcacgcggatgccctggcagcctttgcatctgggctggctcaagaccccaaaagtctccagctcctggtgggaatggtggaagctgccatgaagtctnccatganagacancctggtagcccacttaccagcngcttgcacannatgnaacnggacaagagancntttgctantggtgtctgtnnatgggcaggagctncngncagccggncaccatggggcctacgggntngtcttatangctggcntgaanatngncntttncnngctnaaactganaggctnngtgttntnnnncctnatcagngcacactgnncnnttggnaacacagagaagagcactgnncacatgcancaagactnggatgtnnccaagaccttaggtgaccagacaggagaatgccgagctcatgggaacctaggctctgcattcttttccaaggggaattaccgagaggccctcacaaaccacaggcatcagctggtgctcgcccatgctggggatatccagt

SEQ ID NO: 1844 - DNA, 451 bp, Homo sapiens
  misc_feature (1)...(451): n = A,T,C or G
gggaacagcagcgtgggcaagacatccttcctgttccgctatgccgatgactccttcacccctgccttcgtgagcacagtgggcatcagacattcaaggtcaagacggtctaccgacatgacaagaggatcaagctgcagatttgggacacagcaggccaggagcgctaccggacaatcaccacggcctactatcgcggagctatgggtttcctgctcatgtatgacatcgccaaccaggagtccttcaccgcggtgcaggactgggctacgcagatcaaaacctattcctgggacaatgcccaggtaatcctcgtggggaacaagtgtgacctggaagacgaacgggtcgtacctgctgaggatggccggaggctcgccgatgatcttggttagtgcccaacctnctagctccataccctgtcttcacccttgaatcccagtcccacagg

SEQ ID NO: 1845 - DNA, 544 bp, Homo sapiens
  misc_feature (1)...(544): n = A,T,C or G
attgaggcggtcctctccttgcggggnctggagaatgccaccgagaggaagagagccatggaggatgtggggtaagccctggtctgaggtgaccatggaagaacagagcctggaactcccgggagctgacctttcccaccgtgctgcaggctctgctggagaacaccgtgggaacaggcctgcctggctgcgcatgctgcagtttggaccagaatttcccagattctcagaagatggctactggaatattgaaaatgttctctcacacacacactctccactggcagagatttgtagtgaacaggcctatcctgttcatggatcgggtaaaactaggaacctgctttccaggtcggatgtccctcaccagactgacagacgtggactagtggcttctttttcacctctttctaattggatcacccggggaactgtgcacgcgcagatgtagcatactgtccatgaaaacctgggtagctaggagagggtgtattatctatgcatcttgtttgcaaacactggggctcactttctagcagggcca

SEQ ID NO: 1846 - DNA, 459 bp, Homo sapiens
  misc_feature (1)...(459): n = A,T,C or G
cagatgcctgaaatgcctgcnnatgctgagggcgcccttctcttcctggaggatnatgtncggtatacannactcccncgangggtggnatgaagcccangngcctaacttcatttttgatgaatnccgaacagncctgtgacttctttctcctgctccanagacaggatgttctatgactagaatgaaccctggacggngagaaagatacttgactcctcatgcaacgngcattntcctcctctgtgggaaccanccattctaaggaaagnggntctnaactgtctaaatcatggcatcgnaaggaatttttatcatgtagatgcagaactgttttgtacttgcctcttctaaatgctcagtataactgatggatgaagccattccatcttatgttctaaggatctgtttgtgcaactccagaccttcagtaaaacagcattgctagtaaaaaaaaaa

SEQ ID NO: 1847 - DNA, 506 bp, Homo sapiens
  misc_feature (1)...(506): n = A,T,C or G
tgaggtgcggtctttncctgntcgcggtggagctggcggagcccgaggaggtggaggtgctggagcccgaggaggacttcgagcagtttctgctgcccgtcatccacgagatgcgcgaggacatcgcgtcgctgacgcgcgagcgcgggcgcgcgccggcgcgcaaccggggcaagctgtgggagatggacaatatgctgatccagatcaagacgcaggtcgaggcctccgaggagagcgccctcaaccacctgcagggtgccggcggcgccgagccccgcggcccccgggcggagaaggccgacgagaaggcgcaggagatggcgaagatggccgagatgctggtgcagcntcgtgcggcggatagagaagagcgagtcttcgtgaggagccggccgcggtttccagccaatggattctggttgagtgatggcgattggctgacatgacaccctggagaagctgaaaccagagagccttttgntttccttttttttttttttaac

SEQ ID NO: 1848 - DNA, 549 bp, Homo sapiens
  misc_feature (1)...(549): n = A,T,C or G
gtgtctgtgacaactacaagctggcaacaaggngatctctgnatgaatatggngaatgccaggtgtacttcctatggtacncagaatactgtcatttgctccaaactggcgtctaaatgcttggcgatgaaggcagaaatgactcacagcaagtctgggaggaggataaagcccgaaggggcgatccagaacaacgatgggctgtaccgacccctgactgcgacgagcaggggctcttcaaagccaagcagtgcaactggcaccgccacgtgctggtgtgtcaacaccgccggagtccgaagaaccgacaaggacacggagatcacgtgctccgagcgcgtgaggacctactggatcatcattgaactaaaacacaaagaaagagaaagcccctacgaccatcagagcttgcagactgcgcttcaagaggcgttcacatctcgatataagctgaatcagaaatttatcaaaaacattatgtatgagaataatgttatcaccattgatctgatgcaaaactcttctcagaaaacactcggcggggtgcac

SEQ ID NO: 1849 - DNA, 504 bp, Homo sapiens
gactgagggttgagatgcgtccgctcaaaagactacaggaaggggaaaccgaggaggagacatgggccgagttgcagagcgccaagcctccagcttgaggcggagcaattcttgatggacagggactaccacccccacccccagaagaggcgggcatcccgcctcggtcccgtaggatggggcctcgaggatctcccacactcaccgcttgccccctacgttcagatgaatcacttccccgggtgctccccgactcgggaccccctccactgcagtcgtcgcgacggccatagccccacccccccgcaagccggccggctcgcacccacttccgggtgtgcatagaccccgcctcttcctcttgctcattggcctagagactccaggatccaccggcgattggacagagagctcgctcaacgcaattacggtctctgactctttaaagagggccggtctttcctggtttcgacggggcgcacttggggatcctttggagtgatt

SEQ ID NO: 1850 - DNA, 300 bp, Homo sapiens; identical to SEQ ID NO: 61
  misc_feature (1)...(300): n = A,T,C or G

SEQ ID NO: 1851 - DNA, 227 bp, Homo sapiens
  misc_feature (1)...(227): n = A,T,C or G
agttccagcatgtggtatatnatgcntagcnttcagagcaaancctccctntccgaacgcctgntcctgaaccatngctgccatccgntccttcccacatganaacgtngaggacctcatcagagggggagcngatgtgaactgcacncacggcncactgaagcccctccactgtgcctgcatgttngtcngacgccgactgngtatagctcctgctggagaaggga

SEQ ID NO: 1852 - DNA, 401 bp, Homo sapiens
  misc_feature (1)...(401): n = A,T,C or G
cagaatgcagaagaactactggagaactaaacaagtctttatcaaagcgacgggaaagaaggaggacgagcatgtggttgcatccgatgcagaactggacgctaagttggaggtttttcacatccatccaggagacatgcaatgaacttgtgaagatagttgagaaataccagctaagactcaacgntntatnacangnanangcnganctatgactntttntnangtgtngagcngagcgggatacnactcnngctggcnanangatggannctgntggcngggccctntgntnttcacncnagcnnaggtgnaacgcngnctctcttcgcccttggattgtatgtcatgtgaccctcctgatgtgtgctaagnttancaaagaacggctactgctgatt

SEQ ID NO: 1853 - DNA, 291 bp, Homo sapiens; identical to SEQ ID NO: 62

SEQ ID NO: 1854 - DNA, 188 bp, Homo sapiens
  misc_feature (1)...(188): n = A,T,C or G
tgaggacaagatgccatcacaggggacactgacnagtatctcgggccacaggaccttaaggagctaggtgatgactccctgccagcagaaggttactgtaggcttcagtcttggagcccgttctgccagcctccgctccttcagttcggataggtcctacaccttgaacagaagctcctactgcaagg

SEQ ID NO: 1855 - DNA, 495 bp, Homo sapiens
  misc_feature (1)...(495): n = A,T,C or G
gactgaggtctgctgggaactggtttccagctgtttggctatgaagagaaactccagaccaatcctttacagcatctctttgatgtttatgnacaagttaataaagaagcaacagatgataaaaatgtaacacaatgaggcacacagagttcttccaccgactatgaaggnggtgtgacacngcangcacttgnnacgtgtggcagagattccnngnactngagcattgaggagnacacncagatttacaagcgtnttggaatngactttgatgaatattcgggagaatcatttnatcgtgaagganctcaagatgncttaaagttggttgacagcaaaggacttntgcanaaagcagcggagggaaatgttgaannngatctctctgggactggtgacctctcttctgtctgcactgagatgcgaagtgatgggacctctctctatgccancagggaccttgcngntgctatacatcgcatggccaaggtggaa

SEQ ID NO: 1856 - DNA, 512 bp, Homo sapiens
actgagggaaggcccggcgactgaagcaggcgaaggaggaggctcaaatggaggtggagcaataccgcagggagcgggaacaggagtttcagagcaagcagcaggcggccatgggctctcaggggaacctgtctgctgaagtggagcaggccacaagacggcaggttcagggcatgcagagttcccagcagaggaatcggggagcgcgtcctggctcagcttctcggcatggtctgtgaagtcaggccccaggtccaccccaactatcgggttactgtctagaaccatcgctcagggacacatccctagagtgactccttctgtcagctccgtccacagagaaatatcccaactcaaaaccacttgtgtcgcatgcgcagagccttgggttcaatccataatatcatcccccccacccaccaaatcgcttcacataataacctgttgctggaggggaggcttctatgtgacaggatccaatattcccccctgagacttacaagtagccaagc

SEQ ID NO: 1857 - DNA, 441 bp, Homo sapiens
  misc_feature (1)...(441): n = A,T,C or G
gggggcctgaggctcctgggtgtccgccgatcctcctcggcccctgttgcctccccaaatgtccggcgtctggagtataagcctatcaagaaagtaatggtggccaacagaggtgagattgccatccgagtgtttcgtgcgtgcacagagctgggtatccgcacagtggcttgtctactcggagcaggacacagggcagatgcacaggcagaaagctgatgaagcctaccttattggccgnggcctggcacctgtgcaggcctacctgcacattccagacatcatcaaggtggccaaggaaaatggtgtagatgcggtgcatcctggctatgggttcctctcagagcgagcagactttgcccaggcctgccaagatgctggagtccggttcattggttccaagcccanaggnggnccgcaagatgggagacaaggtggaag

SEQ ID NO: 1858 - DNA, 329 bp, Homo sapiens
gaactgaggtgaccttgaacaagccctgtgctcctactgtcacctttggcatcaagcattctgactacatgacacccttggttgtcgatgtggaatagcctctgctctctgtgactacgatcctcccacagaaatgtgctgggctggccatggattggacaagtcaccaatggggtccgctgacagcctggccctgcaccacagagcacgctagtttggacggttttgacaagttatttttttctatgctatctcttgtttgttaatctggtttcttgccatgtccaaattattaaataaaccacagattgcacttgcaaaaaaaaaaa

SEQ ID NO: 1859 - DNA, 253 bp, Homo sapiens
  misc_feature (1)...(253): n = A,T,C or G
aaatatgagaaaactcatgtctgcaatttgaagaaattcaaagtttttggtggaatgaatgaagaaaatatgacagagctgttgtccagtggcctgaagaatgattataacaaagagacatttaccttgaaacataaaattgatgaacagatgntcccttgtcgattcattaannttgctccacttttgtcctgggggcccagctttaactttagcatctggtatgttgaacttagtggcattgatgatcctg

SEQ ID NO: 1860 - DNA, 538 bp, Homo sapiens
  misc_feature (1)...(538): n = A,T,C or G
gactgaggctcaagcagtggcacaccattggtcacctgcagccagagacctcctatgacattaagatgcagtgctttaatgaaggaggggagagtgagttcagcaacgtgatgatctgcgagactaaagtgaaacgtgttcctggagcttccgactatcccgtgaaagagttgagtacccctcccagttcctcgggaaacgcagggaacngtggggcctgcaaccagccccgccaggagcagcgatatgttgtacctcatcgttggctgtgtgcttggggttatggtcctcattcttatggttttcattgcactgtgtctgtggaagagtcgccaacagagcaccatacagaaatatgatcctccaggatatctctaccaggggtcagagattaatgggcagatggtagagtataccactctctcaggagcagcccggatcaacgggagtgttcacggaggcttcctcagcaatggctgttctcatctgcaccataaaggccccagtggagtcaacgggaccctgagtggaaacataa

SEQ ID NO: 1861 - DNA, 465 bp, Homo sapiens
  misc_feature (1)...(465): n = A,T,C or G
tttctgcgctagtgctgatcaacgggtgcctgagcgcttccttgctgcactctcatgacacggagacacggnccaccatgaatttggcgcttgctggtgacattcttgntgccggacaggatgcccagtgtcagcttcttcgtttccaggtccatcaacagaagggcagtaaagcangagaagtcnggttccaaggagcagggacctcnacagataaagggggcntcctccagctagagaagaaatcgggagcacaagntcaccctcgaaggggttgaactcaaagtaangaatttggaggcannacagacagacttcagnaatgaaccnntgcagaaagttgngtgcttcanccatgataacaccctgcttgncactggaggaactgntggtcatgttngtgtntggaaggtacctagcctggananagttctggagttcaaagnccatgaaggggagattgta

SEQ ID NO: 1862 - DNA, 560 bp, Homo sapiens
  misc_feature (1)...(560): n = A,T,C or G
actgaggccccatggggatggaatctgtcacctgtaggaccatggcttgcctacgagatccacactcanagccctcatcttccagcttggtgacaatgccggcctgaacctgggtctcagacatggagttcctgccaggaccccagcatcccccagggcccccaaccatggacttggaggagcccaaaggccccgaggtgccctctgagaaccacccctctaacacccagncggccttagggcctggaggccctgtcaccctgagtgagatggagctggacacatccagtgtgcaggagctggttcagcagctanaagctctacccagcgacctgggnggcccattcccagatgganccccctgtcccctgcacattgttaccggccaaggacttgccacccaggagaacccanatgctggtgggctnttgtcggncgaggcaggcggngacnaccttttgggtctgctgagggatgaggcctntncggctgcccaatctgtccctcaagatcctgcacagactgcaccccncnttctggtcaattcatatgtaatcaat

SEQ ID NO: 1863 - DNA, 531 bp, Homo sapiens; identical to SEQ ID NO: 63
  misc_feature (1)...(531): n = A,T,C or G

SEQ ID NO: 1864 - DNA, 477 bp, Homo sapiens
  misc_feature (1)...(477): n = A,T,C or G
cagcagtggccccgagcgcatactgagtatcagtgctgttattgagacgattggagaaattctgaagaaaatcatccctaccttggaagagggcctgcanttgccatcacccactgcaaccagccagctcccgctcgaatctgatgctgtggaatgcttaaattaccaacattataaaggaagtgactttgattgcnatttgagactgttgattcatcagagtctggcaggaggaataattggtgttaaaggtgctaaaatcaaagaacttcgagaaaacactcagacaacaatcaagcttttccaggagtgcctgccctcactctactgacagagttgttcttattggaggaaaaccngatagggttgtaganngcatnangatcatccttgaccttatatctgagtctnccatcaaaggacntgcncaaccttatgatcccngcttttntgacgagacctatgattatggtggtt

SEQ ID NO: 1865 - DNA, 220 bp, Homo sapiens
gcaacagccagcgctttcgggcaaacctgttttgcatttgccttgacaccacaacaggtgcagcagatcagcagctccatggatatttctgggaccaaatgtgacttcacagtgcaggtccaattaaggttttgtttatcagaaaccagttgtccacaagaagatcacttcccacccaacctttgtgtaaaagtgaatacaaaaccttgcagccttccag

SEQ ID NO: 1866 - DNA, 207 bp, Homo sapiens
  misc_feature (1)...(207): n = A,T,C or G
gatggatcgcctcaagcagaacagtctccattggaatccacaagcaaagaagccttctttcacagagtggaaaccttttcttctttgaagtgggcagggaagccccctgagctgtctccacttatctgcgctaaatatggttgggtcacagttgaatgtgacatgctcaagtgctncanctgccaggctttcctctgagccagcctg

SEQ ID NO: 1867 - DNA, 215 bp, Homo sapiens
  misc_feature (1)...(215): n = A,T,C or G
gagacccaaggtcagcagccacctcaacgtcggtatcgccgaaacttcaattaccgacgcagacgcccagagaaccctaaaccacaagatggcanagagacaaaagcagccgatccaccagctgagaattcgtccgctcccgaggctgagcagggctggttgctgagtaaatgccggacttaccatctctaccatcatccggtttgggtcatcca

SEQ ID NO: 1868 - DNA, 394 bp, Homo sapiens
  misc_feature (1)...(394): n = A,T,C or G
ccaggctcctgtagaacagancagccgctgnccacanagcannctncgntcacccccgaggctnaccctgctgcctgtgctctttgnggntggtggtcttctgttgctttccaatgcctcctgtgttgggggactcctctggcaggagaagactgaggcgccttgctgaggagatctcagagaagacagaggcagggtcggaggaggatcgaatcangaatgaatatgaggagagtcagnggactgnggaccggnacacaagaagctncanggttagcacannngaantggncccncactactactncntgagggacttgagtacccagcttcccccaacantgacaagaggngtcatatcgncnagccttcacnggtattgaatatgaggaca

SEQ ID NO: 1869 - DNA, 494 bp, Homo sapiens
  misc_feature (1)...(494): n = A,T,C or G
gactgagggatgaagangccccttctaggtcccagnatgaagaggccaccaagcctgaaggctggctagacgacgaacctgagtatattccagaccctgatgcagagaagccagaggattgggatgaggatatggacggagaatgggaggctcctcagattgccaaccccaagtgtgagtcagcccctgggtgtggtgtctggcagcgacctatgattgacaaccccaattataagggcaaatggaagcctccaatgattgacaaccctaactaccagggaatctggaaaccaaggaaaataccaaatccagatttctttgaagacctagaaccttttaagatgactcctttcagtgctattggtttggagctctggtccatgacatccgacatcttttttgacaactttatcattagtggtgaccgaagagtagttgatgattgggccaatgatgggtggggcctgaagaaagctgctgatgggggaggaaga

SEQ ID NO: 1870 - DNA, 154 bp, Homo sapiens
ttttgttccggtgacagaagaagaccccattttgagcagttttagtcgatgccttaaggcagatgtacttggtgtttggcggcgagatcaaagacctggaagaagagaattgtggatattttggtggggtaaagatcccaattttgctgacctt

SEQ ID NO: 1871 - DNA, 457 bp, Homo sapiens
  misc_feature (1)...(457): n = A,T,C or G
aattatgagctcctggntcctttgtcgtggttccaggccacctgacagaggacctccatctgtactcgctgagtgacctgactgcaaccaagaagggagaactggggccccggctggcggagctcactagagcgggagccgcccacgtggagagatgcatgctgtgtcaggccaagggcttcatctgtgaattctgtcataatgaggaggatgtcatctttccttttgagctgcataagtgccggacttgtgaagagtgtaaagcgtgttaccataaaacttgcttcaagtctggacgctgcccccggtgtgagcggctgcaggcccgacggttagctgntggccaagcagagcctggagtcctacctgtctgactatgaggaggagcccacanaanccttggctctagaggccaccgtcctagagaccacctgaggaatgcactaagccctttgtg

SEQ ID NO: 1872 - DNA, 325 bp, Homo sapiens
  misc_feature (1)...(325): n = A,T,C or G
gcgcagcttcaaaagttgaacgactttgggtctgagccacagatggctgaccatctaccacccccagactcaagactacagaatccatcaagacctgggatgtatncgcctccaggatcctatagaccaccccctcctatgggtaagccacctgggtcaattgtaagaccctctgctccaccagcaagatcatctattcctatgactaggcctcctgtgccaataccaccaccgcctccctcccccaactttggaaaccatgaaagtcaccttgtatcacggctcaaagagcaaaaaaatacaatggttctcttcaaaaaaatct

SEQ ID NO: 1873 - DNA, 223 bp, Homo sapiens
gactgaggggctgcatggcccagcgatctggcaaaggccaagaagccaaagactgttgaagccgcagtctccactcttctactgacgccagcgaccacccagcccagccaggccatatggcctcctgcttgcctgatgtatgaggtgggtagcaagcttttcacccagaagaggacgtccgagggattaattacttaaaatccataaacatgtatcattataa

SEQ ID NO: 1874 - DNA, 480 bp, Homo sapiens
gactgaggccgttggagcgatctagtgaagatgtggacataattttcacgcggctgaaaggagttaaagcttttgagaaatttcacccaaacctccttcgtcagatttgtttatgccggttactatgagaacctggaaaaaggaatcacactgtttcgccaaggggatattggaaccaactggtatgctgtcctggctgggtctttggatgttaaagtgtctgagaccagcagtcaccaggatgcggtgaccatctgcactctgggaattgggacagcctttggagagtccattctggataacacccctcgccatgcaaccatcgttaccagggagagcagcgaacttctccgcattgagcaggaggacttcaaggcactatgggagaaataccgacagtatatggccggacttctggctcctccctatggtgttatggaaacgggctctaacaatgacaggattcctgacaaggagaat

SEQ ID NO: 1875 - DNA, 205 bp, Homo sapiens
  misc_feature (1)...(205): n = A,T,C or G
tggacggtgttcgcagcncatcctgatagcgancctttnanntaanngggaagntgaacatttggcatnagctacactggctcgagaccggctaggacaggaaactttcctctccctcctttctgattgggacctcagcacagctttcgccacagcctcgtnctgttanagttgnttctaaactatcctttccatatacaaaggt

SEQ ID NO: 1876 - DNA, 455 bp, Homo sapiens
  misc_feature (1)...(455): n = A,T,C or G
gactgaggtcaggctttgacatgcaagaggttgttctgagcctgttggtccttctagcaggcctgcctactttggatgccaatgaccctgaaantaaaattgaccctttctactatnattgntacagnncnccgagtcggtgggntnatnngaggcagggattctactgngccctggacantatagnccttatgagcnncnaangcanatgcaaggtcagacaganncccagncaccgaccaggagaagggccacctntcatnacaccangctcagntgacatctgctgaanatggaccagttaaaagagcacagggcctggntctgaaggtgggcttgaactccgagctggngtggtctnctncnctgctgacactgccttccccgagcctnatctcacccctngnggtagcaggctctttgttcagtttttaatataaaatgatttcacatca

SEQ ID NO: 1877 - DNA, 292 bp, Homo sapiens
  misc_feature (1)...(292): n = A,T,C or G
actgaggtggggtctttctcaataagctgcaggacgtcttcaacacagtgggtgcggacatcatccagctgcctcagatcgtcgtagtgggaacgcagccagaagaaggcaactgatcttntggaacttgccatacaaanggntgggaactgncatgaacatgctgngaactgaacttangnccttngcnngagcaacangttctcttaactgntgaannatntnttcattgggacttttataataagaactattttttgtaaataaaatgagcaaaagatgaaaaaaaaaa

SEQ ID NO: 1878 - DNA, 307 bp, Homo sapiens
  misc_feature (1)...(307): n = A,T,C or G
ctgcaacaggatgcttntnacatcnaccttggaggctgcngntgcnngctnctnaagcnnctttnctcccgnatgngaaccacctgaactnggacctacgcccagggggctgccatcggatacagtacctgngntnccagcagnccccacagctgctgcaagtggagtttttgcggctcagnncccatgaggaccctcagctgctggatgacaccctagccaaggttccagtggagtctgctgcgccttngctccctggtcctcaaaggtggncngagccggggtgccctgggtgcctgcctccatg

SEQ ID NO: 1879 - DNA, 199 bp, Homo sapiens
  misc_feature (1)...(199): n = A,T,C or G
ctggcttgctttgagtggacatgatanancagagtacnaangatcaagttgatctgganacaagtgcaggntcaatcagaaactgctncgncatcngcattctctgttggcctctcagaaaacatccagtacagacctttttgatntccctgctctccctgcaaatnctattcctgntatcaagaattcaataaaactg

SEQ ID NO: 1880 - DNA, 267 bp, Homo sapiens
tgaaactgacgctcagccgacctctgtgatgttacttgattttatccagcacatcatgaagtcttctccgcttatgtttgtaaatgtgaatggaagccagggccaaaatgaggccaaagacagttgtattgaggacattacaagttctgcttcctgatcttgctgccaaagcaagtcctgcagcatcggctctcattcgaactttagggaaacaattaaatgtcagtcgtcgagagattttaataaataacttcaaatacaaaaaaa

SEQ ID NO: 1881 - DNA, 186 bp, Homo sapiens
tcgcatctatgccacctctttgcccaattggtagtcaccctaaagtgcagagccccaaagctgtgactggaggacttggggctttcacaaaggtgatcatcaaacaggaacctggagaagctcctcatgtgtccacaacaggagctgcgagccagtcagcattccctcagtataaaataaaatttg

SEQ ID NO: 1882 - DNA, 424 bp, Homo sapiens
  misc_feature (1)...(424): n = A,T,C or G
gaacgctgcgcttccgggaacggccacagcgccggagccgtcttctctatctagcgcgtntctgtggtcgccagagtcccacccctttcctcctagggctggggccccngagctctgaggactctgcccggggaggacaccagggcttgctcggtcgcctcgtcgcttgcatcccgggtcatggcggtcccgggacccacggcccgagctggtgccaggngagcagggctagtgaggacggtcgggttgtcagggacgcactgcctgggcagtggggaaggggctgatcccctgcgggtnacttccttgcaactttccttcagtttggnctatttggaaccctggctgcacagaatggagnngacgctgcctcactctaggtactgcggncccccctcttttggcatcttcctcccttagattt

SEQ ID NO: 1883 - DNA, 364 bp, Homo sapiens
  misc_feature (1)...(364): n = A,T,C or G
atagggaatgtgactngagatggaactatttgncacttggnatattacttgccnatatcttgaacatttagcagatacaatttacaggaacagtattgggtgctctgatgtggaaaaaagaaatgcaagggaaaatataaaacagatagtaaaacttcttgcaagcgttcgggctttggatcacgctatatctgttgcaagtgaccacaatgtgaaggaagtcaagtctctgattgaaggaaaatagatctgcgaccaaaaagtgtttgctttgctgccattcccagtgtgtacattttgtatatatgtaaagtttcttaaactgtaatatactgattcttgttttaatacaaaaacattatat

SEQ ID NO: 1884 - DNA, 204 bp, Homo sapiens
  misc_feature (1)...(204): n = A,T,C or G
cccacttgggagacccgaaacctcggcccctgccagcctgngcacattngtnatgggccangccacagcctttgaatgagacggctcccagcnanncttnggaaacatcagaagctgctcnccatngacntggacaaagnagagnganaccaacgttnngatccaatngncctcaagtgagacctttgtcccctggagagagtg

SEQ ID NO: 1885 - DNA, 495 bp, Homo sapiens
  misc_feature (1)...(495): n = A,T,C or G
aactgagttccttcaggacaccttggntgccctcttcaacatcatgatggagaactcagagagtgagacgtttgataccttggtgtttgatgctctggtctttattattggactaatcgcggataggaaatttcagcattttaatcctgttttggagacttacattaagaaacacttcagtgcaacattagcctacacacctgaaaatctngntgaaagaganncatgannnantanccttacntttnggaatanatccacgtnctccttcacaccttncatntatctttgaaaantnctgcttatgtccgangangctgacgtatggatgctgctncctgcnacatcgcagncccccaatanncanctgatgaatgannanatnaatgagccttacattttggaataaatccacgttctccttcacaccttccatttatctttgaaaanttctgcttatgtncgatgaagctgatgtatggatgctgctccctg

SEQ ID NO: 1886 - DNA, 258 bp, Homo sapiens
  misc_feature (1)...(258): n = A,T,C or G
atgcttgaatgaaccgctgtgctgatacctgtcaagcagtatccaaagntcaattttgtggggaagattcttggaccacanggaaatacantcaaaagactccaggaagagacctggtgcanagatctctgtcttggggaagggttcaatgagagacaaagccaaggaggaagagttgcncaagggtggagaccccaaatatgcccatttaaatatggatctgcatgtcttcattgaagtctttggacccccgtgtga

SEQ ID NO: 1887 - DNA, 330 bp, Homo sapiens
ctctttgtgaccgcctcatcgcttgtcctgctcccaattccctgcctcccattgttgatcctgaccctctcatcccctgtgacctgatggacggtagagatgcatttctcacccttgcaagggacaagcacctggagttctcttcacttcgaagagcccagtggtctaccatgtgcatgctggtggagctccatacacagagtcaggatcgctttgtctacacctgcaacgagtgcaagcaccacgtggagacacgctggcattgcactgtgtgtgaggattatgacctgtgcatcacttgttataacactaaaaatcatgaccacaaaa

SEQ ID NO: 1888 - DNA, 538 bp, Homo sapiens
gactgagggcatgctggccgacttcgtgtcgcaggcttctcccatgatccctgccattgtcgtcagctgtgtcaatgagatcgagcagcgaggcctgactgaggcaggcttgtacaggatctcaggctgtgaccgcacagtgaaagaactgaaagaaaaattccttaaggtgaaaactgtgcccctcctcagcaaagtggacgatatccacgtcatctgcagcctcctgaaggacttcctgcgcaacctcaaagagcccctcctgaccttctggctgagcaaagccttcatggaggcagcagagataacagatgaagacaacagcacagccgccatgtaccaggctgtcagtgagctgccccaggccaacagggacacgctagccttccttatgatccacctacagagagtgtctcagagtccagacactaagatggatattgccaatctagctaaagtctttggccctacaatagttgcccatactgtgcccaatccagatccagtgacaatgttccaggacatcaaacgtcagctc

SEQ ID NO: 1889 - DNA, 388 bp, Homo sapiens
  misc_feature (1)...(388): n = A,T,C or G
tctgagtgacgatgccatgaggaaagctggtgtggcccacagtaaatctagcaaggatatggagagtcatgtgttcctgaaggccaagacccgggnaagaccctgctgncnaaagnccccagcanagnaannncaggangagtgtgntagcctgatacatgagccccttctacttgtatnctggagaggggagtgcttgcgttgcatgctctcagatncagcctggcgtttgccacaacactctggancctcccatgttccatggaagaaaagtcaagactcntagatnggcncttctgntacaggccctgcctntgactctggcctcatttttgaccatgtcatatatatgtagncngnccctgtnactcccacaggaagctccttg

SEQ ID NO: 1890 - DNA, 531 bp, Homo sapiens
agcatacttcgttgtccccctccccttccggaagacgatgtgaggcgttttcagggccatggtataccaatctggtgttggtcctgtcacaatggaagtgcccttttgaaaatgtcagcactgcccaaagaacaggatgacggtgctttgcaagttcagaagagcttcttggatggaatttacaagactatccacaggccaccctacgagatggttaaaactgaagacttatcaagcaacttcctgtccctgcaggagatccagagtgcatactgtaaatttaagcaactgtttctgatagataacagttcggaattttgggacacagacataaaatggttttctctcttagaaagcagcagctggcttgatataatcagacgctgcctgaagaaagcaatcgagattacggaatgcctggaagcgcagaacgtgaacgtcctcctgttggaagagaatgcttctgatctctgctgcctcctctcctctctggtgcaagtgatgatggacgcccactgtcgaaccaggact

SEQ ID NO: 1891 - DNA, 498 bp, Homo sapiens
  misc_feature (1)...(498): n = A,T,C or G
gaggccccggtgtctcgagcgcatataagcctcggcccctccgaggagcgcgcagtcgactctggattctggagccttgcngactctacccagccagnttgcactcttcggctcagcatcttgnaaagctctgcngagtntccaccttgcagactccaagatgcagggaccttggcctgatgatggctctggcntttgatcttcgtgctaactggtatccccaaatcctgcgccttgctggaagcagcccaggaggaangtgcatgtgactcctgaccttccaggcctggagaaagtncaggtccggncagaacgtcnattcttgaggaaagacctccagcgtgngcgaggggaccttgntgctgccttagattcctggatcacnaaacgccagcatccgggcaaaagggaggagaagttggaagacgaagccgaagagaggggagatttgggagaagngggagcctggaagaccccacaaacgacagcaccctggca

SEQ ID NO: 1892 - DNA, 231 bp, Homo sapiens; identical to SEQ ID NO: 64
  misc_feature (1)...(231): n = A,T,C or G

SEQ ID NO: 1893 - DNA, 495 bp, Homo sapiens
gactgaggttatgagaagacagatgatgtttcagagaagacctcgctggcagatcaggaggaagtgagaaccatcttcatcaaccagcctcagctgacaaaattctgcaacaaccacgtcagtactgcaaaatacaacgtgatcacattccttccgaggttcctctattctcagttccgaagagcggctaattcgttctttctctttattgccctgctccagcaaattcctgatgtgtcgccgaccggtcgttacacaacactggttcctctcttatttattttagctgtggctgctattaaagagataatagaagatattaaacgacacaaggctgataatgctgtgaacaagaaacagacacaagttttgagaaatggtgcatgggaaattgttcactgggaaaaggtaaatgttggagatatagttataataaaaggcaaagagtatatacctgctgacactgtccttctctcgtcaaggtagagacaccta

SEQ ID NO: 1894 - DNA, 495 bp, Homo sapiens
  misc_feature (1)...(495): n = A,T,C or G
gaactgagggcctcccttctggggcctggtgacgctgcctggagcctgtgcgctgtggggaagcggcagagccccgtggatgtggagctgaagcgggttctttatgacccttttctgcccccgctcagactcagcaccgggggagagaagctccggggaaccttgtacaacactggccgccatgtctccttcctacctgcatccctgacctgtggtcaacgtgtctgggggtccccttntttatagccaccgactcantgaactgcgcctgctatttggagctcgagatggtgccggctctgaacaccagatcaaccacgaaggcttntncgntgaggtgcagctaatccacttcaaccaagaactctatgggaacctcagtgctgcctcaaggggccccaacggcctggccattctcagcctctttgtcaatgtggctgncagntccaacccattcctcattcgcctcctcaaccgggacactatcacccgaat

SEQ ID NO: 1895 - DNA, 501 bp, Homo sapiens
  misc_feature (1)...(501): n = A,T,C or G
gactgaggttcttttagagcaagatatatttcataaatccttgatggcttgttgtttggaaattgtgctctttgcatatagctcaccccgtactttcccgtggattattgaagttctcgatttgcagccattttatttttataaggttattgaggtggtgatccgctcagaggagggcctttccagagacatggtgaaacatctgaacagcattgaagaacagattttggagagtttggcttggactaataattctgcactgtgggaggctctgcatgcttctgcaaacagagtcccttcctgtgaagaagtaanccannnntanacgaanagaataagttntgtttnnngagagagggnnnntttgcnnatnctngcaatggtatgnacgatgctctacacnagttcangccagatgtactctaacactgagaggnggananganangagtccnacncaccccanattatcacattatctgcacatgatgactattgcaa

SEQ ID NO: 1896 - DNA, 368 bp, Homo sapiens
  misc_feature (1)...(368): n = A,T,C or G
gacccatcgcttcagatcgncatacctgatgcactcagtgagagagatanggncnngtttacngtgcacactattaacgtcggctctcaggaggctacaacaggactacgtaaaagctcatgtccaacctgggcgtatgtacagagcaccaggccnacaaanacatgannggcangaccctnacagaaaacccaaacacctgagtctcttttntgcaanagtacggaaggctttctccaagctatatncaattattcaacatgttgtggaggaaagaaagtgtgtattattgnagnannaaaccagattataaaanccanntattgtcaagtcagtttttatnataatngttcatgaatatgcacagt

SEQ ID NO: 1897 - DNA, 389 bp, Homo sapiens
gactgaggtggggtctttcatcccaactcatgatgcgcacccggatcgctgcacagggtttcacggtcgtagccatcttgttggggttagctggcatctgctatgaagtctcaagcctgagtatagccgggtcttaaagcgccatggaaaccattacaaaacccaggaacaacagacatccctgtcagacttgctccctccgtttcagaccggaccttattgtcatttgggtgaggaagtggccgattttgtaactgatttgcgcttccaccgctgccccctcccgctcccaaaatcccaggttcatttcagttgggttgcatgcttctatttgtgatgcgtccccttaattacttaataaaagcttattacacttgtaaaaaaaaaaa

SEQ ID NO: 1898 - DNA, 440 bp, Homo sapiens
gcatggcagacagctcttaagacagtatcttcaggaagtaggatacacagatacaatattagatgtactgatctcaacgggtaaggtcattaccttggacctgtctaattcagagccaaatggatctgtagaagcaaagaatttagaacagatcttgaatggtggtgaatctcctaagcaaaaaggacaagaaatcaaaaggccccctggtgatgttctcgagacattcaatttcttagaaaatgctgatgacagtgatgaagaagaaaatgacatgattgagggcatcccagaaggaaaagacaaacttcggatccataagcacaaaataggtaatgaaggtttagctgctgacttaactgatgatccagatactgaggaagcactgaaagaattcgactttttagtgactgcagaagatggtgaaggggctggtgaga

SEQ ID NO: 1899 - DNA, 250 bp, Homo sapiens
  misc_feature (1)...(250): n = A,T,C or G
gtgagcctctgtctcanatgcctatgctaacctcatgacccnaaaagagaaggactgnntgataanagtgcaagatggttcaactgcagagtgagaacccccgcctggatgattactacataccagaaatactatcagaagctggagaagagacaggcagacaaagagctgcttggacagaagaccagggctgagtctntcaagtnggtcacgccttacatccagaagcctgaagtttatgagtcaaagc

SEQ ID NO: 1900 - DNA, 344 bp, Homo sapiens
  misc_feature (1)...(344): n = A,T,C or G
ccacagctcactgctgcaggacggnagnaggcacgggcagcctgataggcagnggngctnatcctcaccttattcctactgcncctcttggtctgnttcctgaaccgggagttcnaggtcagctacnggcngcactaccatggggatgtggaggccgacctacaccgcaccaaggatccagagcatgaggagaccangctgactggctacgtgcggaacatgatncnntaccatgtggctgagcanctnaaggnctntcacacctactccaanaaccatgacagcgngggagtcatctttgccagcatngtnaacttcantgaattctatgaggagaactatga

SEQ ID NO: 1901 - DNA, 284 bp, Homo sapiens
  misc_feature (1)...(284): n = A,T,C or G
gaggtctgggccattctgctgaactggcattttctgtggagccaaatgatgatattgccaaccctgggcagcccatagtgctgggctgcaaagtggagggcacccctccagtgcaagtctcctggaggaagaatggagcattagctaccagagggcacccacaccactctgctggccaatgnttccttgntgatccaccacttnaggctgnancanggangnancncttcacatgagggngactatgaatgtgttactcaaaaancgttttgggctggtgatca

SEQ ID NO: 1902 - DNA, 465 bp, Homo sapiens
  misc_feature (1)...(465): n = A,T,C or G
gagaagacattttgcaaaagggaatgcatctttgtaattcccagtacaaaagaccctaacagatgttgctgtggtcagctcactaaccagcacatcccccctctgccgagtggggctcccagcacaacaggagaggacaccaagcaggcagacacgcagtccgggaaatggtctgtcagcaaacacacccagagctacccaacagactcctatgggattcttgaattccagggtgggggttactccaataaagccatggtnanaggggtatantacnanancaaancagattccntgctncacctnatggtgaaggactggcagctggagctnccgaanctcttgatatctgtgcacggaggcntncaaagcttcgagatgcngnccnnanntgaagcaggtgtttgnnanaggttttntcaaggctgccattnaccacgggngccgntgatcttcaccggcaca

SEQ ID NO: 1903 - DNA, 184 bp, Homo sapiens
  misc_feature (1)...(184): n = A,T,C or G
ttgcaaaggaaatgcttnctaagnacttcaaacacaatancatgggtgagctttgggagacaactaaatatgtntngccttnccgaaaagtantgcatntcgaatntggaaattatcaaacaggaaagagatggccctgttgtttttnagcatccttatttnaagcaaggccaggatgaccctg

SEQ ID NO: 1904 - DNA, 531 bp, Homo sapiens
  misc_feature (1)...(531): n = A,T,C or G
ttttgagggaccgagcagaatggnttgatatagacccagtgccccagaatgacggccctaacccagtggtccagatcatctacagtgaaaagtttagagatgtttatgattacttccgagctgttctgcagcgcgatgagaggagcgaacgagcctttaagctcacccgagacgctattgagttaaacgcggccaactacacagtgtggcattttcggagagttctcttaangtcgcttcaaaaggatctacaagaggaaatgaactacatcactgcgataattgaggagcagcccaaaaactatcaagtttggcaccacaggcgagtattagtggaatggctgaaagatccttctcaagagcttgagttcattgccgacattcttagtcaggatgccaagaattaccatgcctggcagcatcgacagtgggtcattcaggagttccgactttgggataatgagctgcagtatgtagaccagcttctcaaagaggatgtgaggaataactctgtgtggaaccaaagacact

SEQ ID NO: 1905 - DNA, 536 bp, Homo sapiens
  misc_feature (1)...(536): n = A,T,C or G
tgaggagcaacaagcattgagngtatgacctccgtacaaatatgtggactcctgtggcaaacatgaatgggaggaggctccaattcggcgtcgcagtcttagatgacaaactgtacgtggtcggagggcgagacggactgaagactctgaacaccgtagagtgctacaaccccaaaacaaaaacctggagtgtgatgccacctatgtccacacacaggcacgggctcggcgtggctgtactagaaggccccatgtatgcagtcggagggcacgacggctggagctacctgaatactgtggagcgatgggaccctcaggcccgccagtggaattttgttgccactatgtccacccccaggagcacagtaggcgtggcggtactaagtggaaaactctatgcagttggtggtcgcgatgggagctcttgcctcaagtcagtagaatgctttgaccctcataccaataaatggacactgtgtgcccagatgtcaaaacgaagaggcggagtaggagtcacaacctggaacgggctggtg

SEQ ID NO: 1906 - DNA, 205 bp, Homo sapiens
  misc_feature (1)...(205): n = A,T,C or G
ttttgaggaactctaattgaagtttcggnggacnacggtctttatagaccagaatcttagtcctgggntttgtgtggtatntctngnngccgtccacccgtccacagtcaacacactngggaagcagctttngccaaaaacctncggacagtccaangacgntnccncacngcagngccggcgattgggcagcctcacagaccgg

SEQ ID NO: 1907 - DNA, 534 bp, Homo sapiens
  misc_feature (1)...(534): n = A,T,C or G
ttgagggactgctgagatgccnttcatggtagatgacatcatgaggcttctgtgctccatttcccaggnttggaagatgaaggcggccgtcaagcactctggaaagggtgccatggttgcgggggcaatggccttcgtcggtggcttggttggtggcccaccaggaatagctgttggggggaccgtngggggcctgaataggtgcctggatgacgagtgnacngtnnaagcccgntcctcanancttannggagctnccccncggtgaacagcangaaacttgttaacgaanccatggaanatnatcgnnaacttggactgtncanacgctgtncanctnactgntctncctatgagcanccaggncanncngcagaggctcttggccatgctaacgacctatgtnaccnnagagctgcaggctgagatnnactatgaggactaggccccacccngtgnggagcggggctctcattctagatgaccnctatggctcattgaaggtgaccaggnaatgggggaagccctgacttc

SEQ ID NO: 1908 - DNA, 462 bp, Homo sapiens; identical to SEQ ID NO: 65
  misc_feature (1)...(462): n = A,T,C or G

SEQ ID NO: 1909 - DNA, 498 bp, Homo sapiens
gacttggtgtgcctgctctcctgttccccttgacgaacttgggaaaatagcaacggggcagccacacactgtatccactggccaacaaccacaggatggagatctcatccagcagctgtcccagaaagctgagtgtcatgtggaaatacatggagaacagacctgtgggaaggcagacgcaagtagaggccgtcaaggggagggagcatttccagcacacttccccagcctcaaacacgcacacctacctatgagcatgaagaggactgacactccatagaaacaccgggtacgcttctgggcatacggatgcatgaggaacatcatgaggggtccaaagatgaggaagaacacattgctgaactgcaggagaaacaagaacagagctagtaagacaagagctggtgggagctcctgcccacctagggctcattcctaagtaccccatcgcatgggctgtccaggaatgaaccaagatttgtccatcatttattctac

SEQ ID NO: 1910 - DNA, 179 bp, Homo sapiens
  misc_feature (1)...(179): n = A,T,C or G
gactgagaagcgttcagagaccgcgtgttntcagngngctgctgtctgctggggccttaccgangaaggcanatattactgtacttactgccacagtgtcgcagatcganctgangaagctggtgagcagcgtgnatatatncccaannccttgatcaacatccatcaacagggggctg

SEQ ID NO: 1911 - DNA, 512 bp, Homo sapiens
  misc_feature (1)...(512): n = A,T,C or G
gactgaggcatccgaaggtgtccccatgaggttcttcacgaagctggaccagctcatcgacttttacaagaaggaaaacatggggctggtgacccacctgcagtaccccgtgcccctggaggaggaggatgctattgatgaggctgaggaggacactgtagaaagtgtcatgtcaccacctgagcttgcctcccagaaacattcctatgtctgccgggcccagcgaggccaaggaccttcctcttgcaacagagaacccccgagcccctgaggtcacccggctgagtctctccgagacactgtttcagcgtctacagagcatggataccagtgggcttcccgaggagcacctgaaagccatccaggattatctgagcactcagctcctcctggattccgactttttgaagacgggctccagcaacctccctcacctgaagaagctgatgtcactgctctgcaaggagctccatgggtaacggagagccctganagaggggtgggggagcttc

SEQ ID NO: 1912 - DNA, 514 bp, Homo sapiens
gaactgagacagatgtacagaagatcttaagaaatgcaaggaagctccctgaaaaaacacagacattctataaggagctgaacaggttacgaaaagctgccttagcctttggtttcctggacctgcttaaaggggtggccgacatgctggagagggagtgtaccctgctgccggacacagcccacccagacgccgcattccagctcacccacgctgcccagcagctcaagctggccagcactgagtatgccatatatgaccacaacatcacacccctgcacacagacttctcagggagcagcactgaaagaatgtgatgctgagctctggagcgttccttcacgttcactttgtctgaaggcaatttagagttaaaaccttctccagctctatcagaaacagcatttgcccgtctgaatgtttctactgcagtctgagaaaggtctgaaggctggttgtctggggctcagtctctaggtccagaaacagcctttgttccatgataggcacctcc

SEQ ID NO: 1913 - DNA, 489 bp, Homo sapiens
  misc_feature (1)...(489): n = A,T,C or G
agccatgaactgtacactcaggacgttgctcatctgcccagtgtacacgcccacaagctcacctgaagagccgtcagcaggtgtgttgcagcacgtgcttctgatgtcccagacacagcacggagttgtccatggaggcagaagcaatcagaccgctgtccgggctaaaggccagactggtgatgctgtccgtgtggcctctcagttctttaaaaagtgtcccagaggccaagtcccacaactttaaccgctggtcctcaccagcagatgccaagtacttaccattgggagaaaaggagagggagagcacggggcctcggtgacctgtgaagagccgcaccgagttcccctgctgggcactccatagccgaacagttttgtcagtggaccctgtagctaagtagttntgagttggggtggaattngacacagtccacatntgccaggtgtcctgcatatatcctcancgggtacgtccgatcaaaagac

SEQ ID NO: 1914 - DNA, 512 bp, Homo sapiens
  misc_feature (1)...(512): n = A,T,C or G
tgagctgaccatatgggatttcttgtgccattnttcttttgtcgattatttttcgtgatgaccctgntctatgacttcctcctcacccctgacactactcagccttcgtggctttcttcactttgccgatgtaggcctcaaagaagaaatggcagaagagcacaaggtagctgaggtacatgagcgaggaccagaagatgttctgaaagtgggagtagcactggtcgttgtcatgctgcatccagttgaagaccaggtagttaatgacacagcccatcagcatctgagtgatctgggacaaggtgatgaacatggcaaacttccgggagactcggaaacccgcagcccgcaaggcgtagtaagagtacatgacggcatgcacgccatagttcatagtcatgaaccaaccacccccagcgaccatgtctttgtaggagtaccaggagtacaggagcacagtgatgtggtggtaccagtgcaggaagatcagtttctgtttcctcagaactata

SEQ ID NO: 1915 - DNA, 413 bp, Homo sapiens
  misc_feature (1)...(413): n = A,T,C or G
gcagcaggtctccgatgcagctgacctncactgggtggccgnagcancgcacggaaaagaatggtgttcagcgtncagnagtccggcgaagtcagcgacctgaaggacatggtgccgaggtggcaggtgaatcccacttcggggaatccaaggcagaaaagacctctgcgctcaggtccggatgttaaccggaagcagaaatcgaatggcgaacgaggccacagatgtggtgactgcgggaagtttttcctccaagcctcaaacttcattcagcaccggaggatccacactggagagaaaccgtttaaatgtggggagtgtggaaaaagctacaaccagcgggttcacctcactcagcaccagagagtccacaccgncgagangccctacangcgtcaggcgtgcagggaaag

SEQ ID NO: 1916 - DNA, 193 bp, Homo sapiens
  misc_feature (1)...(193): n = A,T,C or G
cgtccagcagccggcagcatgttgcctagtaagaatgttcatgtcaactgctngnatganaatggaatgactcctttgatgcatgcagcctataaagggaaacctnnagatgngnaagcntcctcctgcnccatggagctnacgccagntgncatnagcatgagcacggctcacaggcctcatgtgtgcttga

SEQ ID NO: 1917 - DNA, 411 bp, Homo sapiens
  misc_feature (1)...(411): n = A,T,C or G
tggacacaggcccgggcgcgtgantaggntncttgtcntcnctatgncnannanncccatcatctccatnacccctgagcccactcattggccaaaccngaacngtagtgnccaacncnatgcatcatgacacatnttctttcctggggcgagccaggagcatcatcaacaganggaggacttggagggcatgacnnatnanagctnaccnagcctnncacgtaggcatgtggtgnngaccagtgctagaccantaaaaagntntgtntttagtcatnaacgaggggcgaatgtgcttggaccagtactctatgctgccagcaaccccatggggcgtgtgggagataattaagcgaacaggcattccaaccttagggaagaatgtggtagnggctggcaggtcaaaaagtt

SEQ ID NO: 1918 - DNA, 479 bp, Homo sapiens
tgcacttggctctcaaaacgggtccacctgatgaatcccatggtccctgggttaactgggagcaaaatgagctcgtcagaagaggagtccaaaatcgacctccttgatcggaaggaggacgtgaagaaaaagctgaagaaggccttctgtgagcccggcaatgtggagaacaacggggttctgtccttcatcaagcatgtcctctttcccctcaagtctgagtttgtgatcctgagagatgagaagtggggtggaaacaagacctacaccgtttacctagagctggagaaggacttcgctgctgaggtcgtacaccctggagacctaaagaattctgttgaagtcgccctgaacaagttgctggaccccattagagagaagtttaatactccagccctgaagaagctggccagtgctgcctacccagatccttcaaagcagaagcctcctgccaaaggccctgccaagaactcataaca

SEQ ID NO: 1919 - DNA, 350 bp, Homo sapiens
  misc_feature (1)...(350): n = A,T,C or G
ttagaaacgtattgaaggacttattgagagagaatatttggcacgaacacctgaggatcgcaaagtatacacatatgtagcataaaatgcattcagaaatttgatttattcttggactgtactcttcgcatggactgggaagttcttttaaatcatactattaagacgaccatcctcttctgttaaattgcagtacgtgttatagaccactcagatcaagcctctactccctctgagagttttcaacatcagttgattgagcttcaggctttccaacngttatccctgcagagatcatctttacagntcctcgggaaaatgtgaatgngccgcgttttgttttaatattg

SEQ ID NO: 1920 - DNA, 273 bp, Homo sapiens
  misc_feature (1)...(273): n = A,T,C or G
gagggtagatgacttgtctgcaaagctgtgggatgtaagcacagggcagtgtgtttacggcatccagacccacacttgtgcagctgtgaagttcgatgaacagaagcttgtgacaggctcctttgacaacactgtggcctgctgggagtggagttccggagccaggacccagcacttccgggggcacaccgggggccgggngtgntctcctttttcaagaatctttacagttactttagccatgccttgtaagactnagagtcaaatattaaa

SEQ ID NO: 1921 - DNA, 524 bp, Homo sapiens
ggtccccagtttcctttgacagtgaaataataatgatgaatcatgtgtacaaagaaagattccccaaggccactgcacagatggaagagcgactagctgacattcatttcctctaacactccagatagtgtgttgcccttggcagatggagcactaagctttattcatcatcaggtgattgagatggcccgagactgcctggataaatctcggagtggcctcattacgtcacactatttctatgaacttcaagagaatttggaaaagcttctgcaagatgtaagtgtcttgacgaggaatgtaatgacacttccacaaggtcatctcgggaattggcagtgagctcactcttccagctgctggccacaatcaggtctccttgccagtgaataggagtttccatgtttggtactgatgatctgatgttcttcccacggcctttccatcactaagagaagcctgcttggtttcagaggaactcagttttgtgaatggttctctaaagccaaagctgtattactctg

SEQ ID NO: 1922 - DNA, 540 bp, Homo sapiens
  misc_feature (1)...(540): n = A,T,C or G
actgaggccacctctccctggncttcctggnctacaagtccaactctgagccattcttcatgatgatctccactccagcgccccactcaccgtggacggctgctccgcagtaccagaaggctttccagaatgtcatcgcaccaagaaacaagaacttcaacatccacgggacgaacaagcactggctaatcaggcaagccaagactcccatgacgaactcgtcaatacggttcttagatgacgccttcaggaggaggtggcaaaccctgctctcagttgacgaccttgtggagaaactggtgaagagactggactcgaccggagagctggacaacacgtatatcttctatacctcagacaacggctaccacacagggcagttctctttgccaatagacaaacggcagctgtatgagtttgatatcaaagttccactgttggttcgagggcccggcatcaaaccaaaccagaccagcaagatgctggtctcaaacatcgacttgggtcccaccatcctggacctcgctggctatgacctgg

SEQ ID NO: 1923 - DNA, 403 bp, Homo sapiens
  misc_feature (1)...(403): n = A,T,C or G
gatcattataaggtaaaagctatgactacggtatcgatatgtggtctgtaggttgtaccttatatgaactctacacctggaaaaatcttattccctggcaaaactaataaccatatgttgaagctcgccatggaccttaaaggaaaaatgccaaataagatgatccggaaaggtgtattcaaagatcaacattttgaccaaaatctgaacttcatgtacatagaggttgataaagtgacaganagggagaaagttactgncatgagcaccattaatccaactaaggacctgttggctgacttgattgggtgccagcgacttcctgaagattaacgtaaacaagtncaccagctaaaggacttgttggaccagatcctaatgttggacccagctaagcgaatta

SEQ ID NO: 1924 - DNA, 186 bp, Homo sapiens
  misc_feature (1)...(186): n = A,T,C or G
ttttttggttggcaccgnctgggcctcacacngttgtatcatncacctgntgattcnacccaatggtcgngtggcactcaggaccctnggggacacagggnntatgcccccagacaagattactcggtcctgaggctgactatcaggactgcanncgtgtcctctgntggtggcctgactacagcc

SEQ ID NO: 1925 - DNA, 285 bp, Homo sapiens
  misc_feature (1)...(285): n = A,T,C or G
ttcacctctgacctactgcagaagagagcacctgtgctggccctcagcctcttcctggccgncgggtcccttgntggntntagccgctctccaaacaataagtccatcaatgcgcttctgatgaccattacagggttttttatcaggnggaccatccaatatggatagctntgctatttctgtagacttgggtcgccnagagctganccaanggaacagngaggctctggcgactgccacggngatngnctgatggacagggaatnttggtgctgctgtgggcca

SEQ ID NO: 1926 - DNA, 160 bp, Homo sapiens
  misc_feature (1)...(160): n = A,T,C or G
gtgcgctgtggaggacatggagtgctcagacacacaggtgcaagaggccgcacagacccgttcacgaaccagaaagaaagcccagaagtanactgagattccaggaaccatcttctctgcctattcatttgattttttttntccttttctgatttttgcc

SEQ ID NO: 1927 - DNA, 374 bp, Homo sapiens; identical to SEQ ID NO: 66

SEQ ID NO: 1928 - DNA, 272 bp, Homo sapiens
gatgaaaagaggctactggctccagggttgaaggttcgtaaaggcctctgggattaccctctgaagaaccagcagatggaatgccggagtgactgaaaaaaatgggtgctaatgcatctaactatcctcattcatgttccccaagggtagggggaaattcacaggcccagcagactttcataggaacatcttcctattctcaacaaggctatggttgtgagtcaaagttgtatagccttgaccatggccatgagaaaccacaagacaaaaaa

SEQ ID NO: 1929 - DNA, 353 bp, Homo sapiens
  misc_feature (1)...(353): n = A,T,C or G
tacttctgcttgaatccacccttgnnngaaatccatcaagtcttgttgacacagagagaccctgtctaggatggtgggagtccttacaactcagcantgacagctcatcttattcatttgatgattntgcaggggtgaacacataagggaaatggtgaagcaaatcaatgacntccgaaatcatgtcaccttctgacaccacctggantgaacataacttgaaggctgtaaaacaaacagggagcactgnttaatttataaaggagcattttggataagatttgcgtgtggttattcttttgttatncctttttgctattatgntctgtnaaataaatgaatttattcaaacc

SEQ ID NO: 1930 - DNA, 202 bp, Homo sapiens
  misc_feature (1)...(202): n = A,T,C or G
caacccatacccatatagcanacatgantgacgtttcgcaaaaggcagagattcaanaaatgcttncttctgatgatgaggaaganagttctcctaaaatngaaaaggcttatgtcccaaagctaacagggacagttaaaggtaaattcgatgaaatggagaaacacagacaggaagaacaaagaaagagaacaaaagaaga

SEQ ID NO: 1931 - DNA, 166 bp, Homo sapiens
gactgaggaggaccaggatgggagtcaaggcttgggcaagagaaagagggtgaagctaagcagtggcaccaaagatcaatccataatggatgttttgaaacataaaagttttttagaagaactattattttggacaataaagtatgagttcccacagaaaaaaaaa

SEQ ID NO: 1932 - DNA, 410 bp, Homo sapiens
actgaggtctagcgatgaagctcattatcctggacactattcccaggccagtgagtgggcggccaagtatattaggaaccgtatcatccagtttaacccagggcctgacaagtacttcaccctggggctccccactgggagcaccccgcttggctgctaccagaagctgatcgagtactataagaatggggacctgtcctttcaatatgtgaaaaccttcaacatggacgagtatgtggctccacgccattcctctctgcaaattcgatcctgggatccaggttctacgtctggactgtgtcgtcgctctgccaggcacccttggtggaagctgggacttgtgcccttggttatctcctctgtcacccaatcattttgtgacggtttcattttaattattaaaaaaaaaa

SEQ ID NO: 1933 - DNA, 310 bp, Homo sapiens
  misc_feature (1)...(310): n = A,T,C or G
tgagacagcatacaacagaagatgatggtntagccgtgtgtagctgaangaanagttgaaaanctaatgaaagnagttctggnagaagcccacatcaccctgaccatggtgtggngccgacnanatnctaanggtgcnggttnnctacangcaaaatgcnatgagcatgnnccagacgcacaggttcngntacatngatgaatgangggccnnggttgcggacctatggcaaanaatctnaagccaaggatgtcatcgaggaatacttcangtgcaagaaataantaaattttggctgataaaaaaaaaa

SEQ ID NO: 1934 - DNA, 493 bp, Homo sapiens
  misc_feature (1)...(493): n = A,T,C or G
gactgggttcattttgacgccaacncctcggtccttcatgatgaattcatcgcgcacaggcttggtttaatccccctcactagtgatgacattgtggacaagctgcagtactcccgggactgcacatgtgaagagttctgccctgagtgttctgtggagttcactctcgatgtgaggtgcaatgaagaccagacgcgccatgtcacctcccgagatntnatctccaacagcccccgggttattccggtgacatctcggaaccgggataacgaccctaatgactatgtggagcaggatgacatccttattgtcaagctgaggaaggggcaggagctgagacttcgagcctatgccaagaagggctttggcaaggaacatgccaagtggaaccctactgcgggggtagcttttgaatacgatccagacaacgcacttaggcatacagtgtatcccaagcctgaggaatggcccaagagtgagtattccgagctgg

SEQ ID NO: 1935 - DNA, 403 bp, Homo sapiens
  misc_feature (1)...(403): n = A,T,C or G
cctcctggtggctacggncatgctcanctggtctgncaggtgnntatnccggctaccctgnctacnctnaacctggttacaggtcatcctgctggctacccacagccggttcctcccgtccatccaatgcccatgaactacggccatgactataatgaagaggagagagcaggaagtgacagctttcntcctggagaatgggatgaccggaaagttcgacattccttcntccaaaaggtgtattgcatcatttntgtccagctgctcatcactgtggccatcattgcaatnttcacctttgtggaaccagtcggcaaatacgttgaggaacantgctggntgtgtactacgtgtcctatgctgtcttccttgtcacctacctgancnttgtctgctggcaggg

SEQ ID NO: 1936 - DNA, 444 bp, Homo sapiens
tctgagagactctgcatagaatggtgtttctccgtaaagcatctcatacatacagacccccaaggaccaccagtcacactctggtccatatctgccttttccgtcttccatagcctgaaggatttccggagaaatataatctggagttccaactgccaccgaggactggacctaataaagttcaaatttttattattaaaaaataaattttaattagaaagaggtaccttgagatatacagtatgtatgtaggcgtataataagacatttttatcatctgtatttagtctcctgattttacagagtaattttatatggcctttatattaatagccttcattactcacaatgttatagaacctttactatagttgaatgcatatagggaaacaatattatctgagtcattaacaataaaacgaatgtttcacttaaaaaaaaaaa

SEQ ID NO: 1937 - DNA, 447 bp, Homo sapiens
  misc_feature (1)...(447): n = A,T,C or G
ttttgtatagtcatcgttggaggtggaattgtgggccttgcctctgccagaacgctcatcctgaaacatcctggactttcgattggtgtggtggaaaaggagaaagatttagctcttcaccagactggacacaacagcggtgtcatacacagtggtatttactataaaccagaatctctgaaggctaaattgtgtgtagaaggcgcagccctcatctatgagtactgcaacctcaagggaattccctacaggcaatgtggcaaggtacagcatttcactgtggcctcggtttatttagagcaagcaatttcttaggtttaatgttgaaaattttaaaaagatgtgacttttcctgcttttgtgcctatgtaatttaatatagtactaaggaataacaaaacatgatttgtgatttcatgtanttaaangtaagttttattgacataa

SEQ ID NO: 1938 - DNA, 250 bp, Homo sapiens
  misc_feature (1)...(250): n = A,T,C or G
gaggctaagaatgggacatggatgccaggagacaatgccttttcagttcccgccctttccagatagggcccctgtctttcctgaccgcatgatgcgtgagccccagttgcccacagcagagatctcgctctggaccgtggtggctgccattcaggctgtagagaggaaggtggatgcccaagctagccagctgctgaacttggagggacgcacaggcacagcagggnaantntgatttttaataaatact

SEQ ID NO: 1939 - DNA, 233 bp, Homo sapiens
gactgaggtatcactatgtatgccgttggggtaggaaaagccattgaggaagaactacaggagattgcctctgagcccattgacaagcatctcttctacgctgaagacttcagcacaatgggcgaaataagtgaaaagctgaaagaaggcatctgtgaagctctagaagactctggtggaagacaggactcagcagcatgggacctgccacagcaggcccaccagccaacaga

SEQ ID NO: 1940 - DNA, 477 bp, Homo sapiens
  misc_feature (1)...(477): n = A,T,C or G
gactgagcatgaagaaagcggtgccgctgntaaatgcantagacacggggagattcccacgacttctcagccggattcttcaaaagctccacctgaaggccgagagcagttncagtgaagaagaggaagaaaaacttcaggctgcattctctctagagaaacaagaacttcacctggttctggagacaatatcatttgttttggaacaggcagtgtatcacaacgtgaagccagcagcactgcagcagcaactagagacgattcatcttaggaaagacaaagcggaagcctttgccagtgcttggtcggctatgggtcaggagacagttgagaagttccgccagagaatcctgggccctcacaagctagagacagtgggatggcagcttaacctgcaaatggcccactctgctcaagcaaagctgcagtctccccaggccgtgctgcaactgggagtgagcaaggaagacgccaaga

SEQ ID NO: 1941 - DNA, 404 bp, Homo sapiens
  misc_feature (1)...(404): n = A,T,C or G
ttttttgggtgaaccgctcgcnccaaangctttcaactacncaacagttagttcatgtcactgtcattaacctgtttcaacttcatcatcttcgtgactttagcaatgaaacagagcaacacagttacagccaagatgaacagcctgtgttggacacagttgctggccctctttatgtcttttctcggcatcctgtgcaaatgtcctctccagaatgattctcaggagtccaacaatgcctacccccttcctgcagtcaaggnctccatggactgnntaagactccgacctanagtctttcaagangcanngggtggatgaaagacagntcatttggccctggctaattnntcttctaaanagtttccatncccgngaagatgatcttctcaaatactaatgcc

SEQ ID NO: 1942 - DNA, 333 bp, Homo sapiens
gaggaaagcgggtgatgcagccccaaatcctggaggtgaacttcaaccccgactgcgagcgagcctgcagataccacccctcattcttcaatgatgtcttcagcactttgtttctggacgagactgacaactgccatgtcacccgcatcatctaggtgcccagagttctgcctgttctcatagccagttccagccggttccagccggtccagcctctgctcacagaactgcctttgcagtcccaggcttctccctccctccctctctcccctccttccttcctcagccagagccttggcctaagttatactcaaccctcctgaaaaaaaaaaa

SEQ ID NO: 1943 - DNA, 341 bp, Homo sapiens
  misc_feature (1)...(341): n = A,T,C or G
accgacaagactgcgagnctttcgggatggtggtgaaaatgctgattgaaaaagatccctcattagaaaagtctgtccagtttgcactgaggcagaacttacactgagataggtgagcgctgcgtggaagagctcaagctgtttcattactgagtatgacaactctgctcgggactttggagaccccttttagaagaagaagtacccaggtcaaaaggttttcttagattgtttttttctccttggattgtgtaaatccttactattttgtgatgaagagaaatactttatgatagctaagcacatttctagtactaaataaacatctacaatagcttaaa

SEQ ID NO: 1944 - DNA, 462 bp, Homo sapiens
gtctagatgaacgaatttttgccatgtgtcaagtgaaaagccagccattggttcacctcatgctcacaacacatcccagtttgtacagagttgacaacctctcagatgagggagctctcaacatcaatgacagaaccatacctcagccccccattcttcagctctcggtggagaagttgagcagagatggagcgttcctcatggatgcaggctcattactgatgctttgggttggaagaaattgttcacagaattttctcagccaagttctgggagttcaaaactatgcatcaattccacagacaatgacagatcttccagaacttgatacaccagaatctgccagaatagcagcgttcatctcatggctcagagaacagaggccatttttcccagtactctatgtaatcagggaggagagtcttatgaaagcagccttccttcagagcttggtagaagaca

SEQ ID NO: 1945 - DNA, 388 bp, Homo sapiens
caagcgcaagttagcccgagtttccctggtacgcaaagaactaagagcccggatccagagcctgccagatttatctcgtttgcccaatgtcactggcagtcacatgcacctgccctttgcgggggacatctacagtgaagactgatggccagtctcctccagggccaggactttggcagacatggagacaggttaggtgaatagtcctgtagagttatttttgtacattgttgagaatggtactaacataagaaatgacaaggaagtataaaatgttaaaatgttggtttgttttgctattttattagtgagttaacatgacttagttaaaaccaagtgatgatttctgtgtattaatgaacttaatgattattttcaaaaaaaaaaa

SEQ ID NO: 1946 - DNA, 271 bp, Homo sapiens
actgagggacaagctttaccctgtatacagatccagctgcaaagggatatctgcgattttgggaatcaggctgacctgccttctggaaatggaagcaaatcctcgggactgcagaagactttctccaaactgacatcccggttcacaaagaaagtgtcatgcaccaactctggcagcacacactattccaaaaacatcttcacagctgggtgttcagaggaaaaggccaaaatgatgggcaataatattgatacacggttaaaaaaaaaaa

SEQ ID NO: 1947 - DNA, 239 bp, Homo sapiens
ttagaaaatctaagcaagattacagccagaggaatctttgctggtgccagagtggtgcgaggagtggactggcagtgggaagatcaagatggaggcaatgggcagtagaggaaaggtgtgcactttttaaaggttcaccatccattagagtaccgtgtgttgagaagatttctattgctgctgtaaacacatgtctttgcccatttaaagaaagcaatgttcccgcttaaaaaaaaaaa

SEQ ID NO: 1948 - DNA, 150 bp, Homo sapiens
ctgaggttaagagcaggattgtgtgatcgctgtgcagtaactgaagagcatatgcacaaaaagcagcaggagtttgaaaatatccgacagcagaaccttaagcttattacagagctgatgaatgaaaagaatactcttcaaaaaaaaaaa

SEQ ID NO: 1949 - DNA, 424 bp, Homo sapiens
  misc_feature (1)...(424): n = A,T,C or G
cttggcaaattttgcaacagcctggatctccactnctgtactaccctccggaacatcacccacacccttacatcaggggcaatggacacccgagctgggctggcaactcacgttcttcagaggacagtgctggcgggcataccactcttgagaataaaagcacagaatgagtccatagcccaggaacagagaagcccaaaccatgatgttccagattggccttttccgactgtcgttaacaatgaagttaaaagccactgaagttagaaagaaaacaaacacacagttatccagttgcagcccaccagggctgaggctcagatccaggctgtggctggctcccagcagtaggctctcatatgcatcttttaccctgctcccttattctacaaataaatgatgcttaactactgaaaaaaaaaaa

SEQ ID NO: 1950 - DNA, 268 bp, Homo sapiens
  misc_feature (1)...(268): n = A,T,C or G
aatgctggacattaagaaaggtaatacaaaagactnacagcntatctgggattcccagtagcaggaaacctccagtcacagncagttaagaatggaactggnccaagtgtttataaaggcttagtccccaaacctgctgnnccacctacaaaacctacncaatggaaaagncaaactaaagaaaacnangtttgtnacttntttttctnatgaatttacatatggtgnnggccactnttaatncttttaagtttaacgggccaagaat

SEQ ID NO: 1951 - DNA, 408 bp, Homo sapiens
cgtctctgcagccaacttgagcgaaaccgcctgctttctaatgagctgaagctaacgctgcatggtctttgtgactgacgggcagggctccctgatgcccagtaaacccacaccactgacctggacccagcaaaaagctgattgccttttaaaccgttactgttcgccctaagcaagttgcttttttaatgagggcagctagactaccgttgatttcctggcagcccccaccaagttgcagtggctatttctattctagaagagcttgtgggcgatgaagaaggggcctgggagatttagtgcggaacttggaagcccttagctgcagccttctcacctgtacactgactgtagggcttgctctcgtgcatggatattttctaacaataaaagcactgacttgaaaaa

SEQ ID NO: 1952 - DNA, 297 bp, Homo sapiens
  misc_feature (1)...(297): n = A,T,C or G
gcccccggcttacctttcagggatgttncgctttgaacatcaagagtggaaatctgccattgaggctttcaacaaatgcaagtaagtcctccagtccagaaacgatggctgctcttagttacagccacagtccggctgcagaaccctgtgactggcttcttggaatctaggacattttctttctcagagcatgccactcctcctggtactcagcagatgccctcagagggcntgggttttggttttaaccacatggttttcctgagttttcttttcttaaatacagcttccatattt

SEQ ID NO: 1953 - DNA, 418 bp, Homo sapiens
  misc_feature (1)...(418): n = A,T,C or G
caagcctacaacgaggaactaaagaagctggaattactcagacagaatgctattcgcagttgcccgggactttgagggctgcagtgttcttcgaaagtaccttggccagctacactacctacagagtcgggtgcccatgggctcaggccaggaggctgctgtagctgtcacctggactgagatcttctcgggcaagtctgtgtcccatgaagacatnaagnacgagcaggcctgtattctctacaacctcggngcactgnactccatgctgggggctatggacaagcggatgtctgaggaggncatgaaagttctcctgcacccacttccagngtgcancangcgcctttgcctacctgcgtgaacactttccacaggccttcanngtggacatgagttngccagatccttacgctca

SEQ ID NO: 1954 - DNA, 343 bp, Homo sapiens
  misc_feature (1)...(343): n = A,T,C or G
ctgccgatgctctctgaatgctgttcggttangggaggatnggaaagancncatggntgcctgtggngaggccagntggccanancttccagnancagctatcatgccnnagaagtaaaagagagatttggaagattcaagccnggagttattagtgaggaacttcaagatgcactgggtgtgacagacangagtcttccccctttnatctaccggatgcgccagctgggctacccaccgggctgnctcaaggaggctgaactggagaattctggacttgcactctatgatggaaaccgatgacgctgatggggaaacagaaactggagaaatacagaataaa

SEQ ID NO: 1955 - DNA, 397 bp, Homo sapiens
gaggaaggaaaatccccacggcagtgtttgaaggaaggcaactgtagagctttgcagtattccttttttgaatgtaaaagatcaatgctggatgccagatcaagattcagagggagaaaaggatattgataacatgctgaacgcaagatgaaagtcacccaggattttccatggtccttaacagaaaggaaccaaacgggaagcacagcagctgccgcatctcttccacctctgggccaggtgttcctcccaaggacaccagagaaaatggatcagtgctgtttctgaatgagtctgctggctgaagtcatttatagaagatccatgggactaaacaactatgggctaagaatgtgtctggggaattacctaatgaagagattatgttcaaggatga

SEQ ID NO: 1956 - DNA, 240 bp, Homo sapiens
gactgaggctgagtatgagtttatcagctctggtctctacctagttgtcttactgcacttgtgtgaacaaagcttttctgatatgatgggaaatacaattgaaccaagcactcgtgtccgatttattaaccttgcaagaactcttcaggcacatatggaagatctcgaaacttcagaggatgaattctgaagaagatggagaccataagagaatgcttgatattgcctaacttcatttaa

SEQ ID NO: 1957 - DNA, 472 bp, Homo sapiens
  misc_feature (1)...(472): n = A,T,C or G
tcaggccacgtttacagaaaagttagttactcagatcatacagaaccttcaagtgcaaatctccagcatccatattcgttatgaagacgatatcacaaatggagacaaaccactctcttttggtatttcccttcaaaatatcagccttcagacaacntgatcaatactggatcccatgtttacatgataatactgaaaagctagtncggaagctaatccgattagataatctctttgcttactggaatgtgaactctgagatgttttatctgaatgattacgatgaatcgctgaaagccttgaaaaatggtattgtgaatgaaaatattgntccagaaggctatgattntgnttttcgacctatatctgctagngccaaacttcagatgaatcgacgatcanattttgacttttctgaccccanaannaacctggctggtgattnacataccatagcaattgagtttaataa

SEQ ID NO: 1958 - DNA, 248 bp, Homo sapiens
  misc_feature (1)...(248): n = A,T,C or G
aaccacatgctattagagcacaagatggagcgtccaggcccaggcatcaagccaggagaggtggtggccaccagcccactgccttgcaagaaagagcccacacctgccaccaatggctgtaccggcgatgccaatgggcacccgcaggcaccaacaccaaagctgtccactgnttaaatcaagtgaccggaccgnacccttntacccccaatgcctccaaccatagtacttnagcccttgccaaagac

SEQ ID NO: 1959 - DNA, 270 bp, Homo sapiens
acagccatgcagctatcgactggggcaagatggccgagcagtggctacaggaaaaggaggcagaacgacggaaacagaaacagcggctgaccccacgaccctctcccagccccatgatcgagagcacccccatgtccattgctggcgatgcgaccccactcctggacgagatggatcggtagggggcctgttcctcggactctggttacctctgaagctcccaagaggcctggccacttatggcctcactccctgcccctcttttttttt

SEQ ID NO: 1960 - DNA, 247 bp, Homo sapiens
  misc_feature (1)...(247): n = A,T,C or G
ggcacgacccacggtgggtacgtgtatcgtggggtcaangctctacaggccaaaatcaccctnattgaaagaaatcattgactacttatataagaacagnctgcctttgctgaaggannngtnanacaaganaatgaagaaaaaagacggccngatccaaacacctgcagctcccaaacaagactttntgtncaaagacatnttncattgcgatgatgacagctgatgaagggagcccagaggaccc

SEQ ID NO: 1961 - DNA, 506 bp, Homo sapiens
actgagaacggtatgtgctggagagctgagcaactggagcctcgagttagtgccctagaagaggacatggatgatgtggagtctagtgaggaagaggaggaggaagatgagaagcttgaaagagtgccatcacctgaccatcgaagaagaagctacagagatttggacaagccaaggcgttcacctgcactgcgctacaggaggagccggagtcgttctcccagaaggcggagtagatcccctaaaagaagaagtccttctccccgaagagaaaggcataggagcaagagtccacgacgccatcggagcaggtctagagacagacgacacaggtcccgctctaaatccccaggtcaccaccgtagtcacagacatagaagccactcaaagtctcctgaaaggtctaagaaaagccacaagaagagccggaggggaaatgagtaatggatgcatcttgactttggtccaaatgacctcctgtggctatgagagcatctgtttaagta

SEQ ID NO: 1962 - DNA, 225 bp, Homo sapiens
  misc_feature (1)...(225): n = A,T,C or G
ggacaagtctctgcccatttanaggnctgttaaggtcanatcgnacaactgaagttggaaaatagtngccttactgcagatctctcggctcanatgcagattgtgactagcacagnagagtcagctaaaggaagtacggagncagcattcccgntgtgtccaggacctggccgtgaaggatgaattgctgtgtcancttacccagagcaacaaggagcaggctac

SEQ ID NO: 1963 - DNA, 514 bp, Homo sapiens
  misc_feature (1)...(514): n = A,T,C or G
tgaggaactgggagtgtganagggcagggaagngtggntcacnagccnggctgnantgcgtgctgtnatcggtatctgggattgaggaggaagatntgcanacacacctgnntggaagacgctgacagctgtgtggcccacaatgnnntggagtgtgcacgagccatatatgcctatgccctacnngtcttncccngnaagaaaagtgtgtggttacgagctgcctactttgagaagaatcatggtaccagggagtctctggaagcactcttgcagagggctgtagcccactgccccaaggcagaggtgctatggctcatgggtgccaagtcaaagtggctggcaggggatgtacctgcagcaaggagcatcctggccctggcctttcaggccaaccccaacancgaagagatctggttggcggctgtgangctggagtcagagaacaatgaatacgagcgagcccggaggctactggccaaggctcggagcagcgcacccactgcccgtgtat

SEQ ID NO: 1964 - DNA, 439 bp, Homo sapiens
  misc_feature (1)...(439): n = A,T,C or G
cttagggttttcattcagatgaagangtggcccccagttccctgcgctctgcgcttcggtcccagcgaggtcgagcccctcggggtcggggccgcaagcataagacgaccccccttcctcctcgcctagcagatgtgactcctgtccccccaaaggcccctactcggaaacggggtgaggagggcacagaacggatggtgcaggcactgactgaacttctccggcggtcccaagcaccccaacccccccggagccgggcacgggcacgtgaaccctctactccccgacggtctcggggaaggcccccaggacggccagccggtccctgccggaaaaagcagcaagcagtagtgttagcagaagcggctgtgacaatccctaaacccgagcctccgccccctgtggttccagtaaagaacaaagctggcaaaaaaaaaaa

SEQ ID NO: 1965 - DNA, 318 bp, Homo sapiens
  misc_feature (1)...(318): n = A,T,C or G
ggagggcttaccaaggagggatttgcaacactatgncttccactttgaaggaagcctttatcaagtcacgtcggtaatacagtaccaagcaaataaccattttataacatggtttttagatgctgatggctacataccttgaaactattcaatcggaaaggactgccacatgaccacactactgatgaaggtgacgggtccctgaggctgcatcccacaggtctgcagtgtctgatctgtancctttacacatggaatctgcctcttctgaattgaagctaaacagattctgtcgtgantcngtgtgcatttaataaa

SEQ ID NO: 1966 - DNA, 262 bp, Homo sapiens
  misc_feature (1)...(262): n = A,T,C or G
gactgaggttgggaaggagaaaatgctcaaggtgaagatagtgaagattcatcctttggagaaagntgatgaagaagctgttgagaagaaatctgatggggcctgtgattctccgtcaagtgacaaagaaaattccagtcaaatggctcaggacctccagaagaaggagacagtagtcaaagaggatgaaggcaggagagagagtattaatgacagagcgcgtaggtctccacgaaaacttcctacttcattaaaaaaaaaa

SEQ ID NO: 1967 - DNA, 385 bp, Homo sapiens
  misc_feature (1)...(385): n = A,T,C or G
cagtcaggtatggttccttactcatccaactgcccatgcgccaatgatgctaatgttgacacagccacccgncggggccccaggccgccctcgctcaaagngcactacagcccattccagtctcgacaacagccgcatttcccttatatgacgcacccttcantacaagcccaccaccaacagcagntgtaaggctgccctgntaggaaccgaanggccaaatccncngggnnncttctcctgcttctgccaaccggangcacagaaaaccagaacttcattgatttngtnttttaaaagatacactgatttaacatctgataggaatgctaacagctcacttgnaagngnaggatgtttanggaccgagtataggcattgtagg

SEQ ID NO: 1968 - DNA, 205 bp, Homo sapiens
ttggaacatgcctacttggaagctcaagggatttgggagcccttccgaaggcgactctcctttgaagcctcaaacccgccctttgatgtaggaaggccatttgatctcaagagttgaattttaagggactccctaatatgtatactatctttttatctggagtaataaataaactatgatcttgaaagtgcctgaaaaaaaaaaa

SEQ ID NO: 1969 - DNA, 434 bp, Homo sapiens
  misc_feature (1)...(434): n = A,T,C or G
tatgatggaagccctttgtcaccaacttctgcctggtttggtgacagtgccctgtcagaaggcantcctgggatacttgctgtcagtcagccagtaacatcaccagaaatactggcaaaaangttcaagcctcaagctcttcttgataaagcaaaaaccaaccaagggtggctagattcctcaagatctctcatggagcaagatgtgaaggagaacgaggccttgctgctccgattcaagtactacngntttttngatttgaatccaaagcatgatgccatcagaatcaatcagctttactagcnggncaagtggnctcttntnctagaagagatcgaactgcncggaanaagagatgatgatgttcncagcctngcagtataatatcaanaagctgccaatcatgacntcagganatcatttaaacaacagtg

SEQ ID NO: 1970 - DNA, 212 bp, Homo sapiens
  misc_feature (1)...(212): n = A,T,C or G
acatcctttggttcactaggtcataccgggtctnacttcattttcttcaacgtnntttggcggcagnggaangggcngggntnaaatcaatatcaacttcaactaagatagttaatggcaaaaaaatcacngacaaagaggattgtggngaacggtcaagaaagagtagaagttgaagaagatgggcagttnnagnccttgacaataaatgg

SEQ ID NO: 1971 - DNA, 160 bp, Homo sapiens
  misc_feature (1)...(160): n = A,T,C or G
tgaggtgctcgacaagcgtctgtggcctaggatggacctaagccggagaaagtcactgaccccacccatgcttagtggggtggttcgncgccagccccgtgctctggacctnagctggacaggtgtctccaaaaagcagctcatgtggctcctgaaaaaa

SEQ ID NO: 1972 - DNA, 350 bp, Homo sapiens
  misc_feature (1)...(350): n = A,T,C or G
agtgccgccgcgtgccgccgccgtgtgaccgngggcgctgcgagaacacgccaggcagtttcctatgtgtgngtcccgccggntaccaggcagcaccgcacggagccagctgccaggatgtggatgaatgcacccagagcccaggcctctgtggtcgcggngtctgcgaaaacctgcccggctctttccgctgtgtttgcccggctggcttccggggctcggcgtgtgaagaagatgtggatgaatgtgcccagcagcctccgccttgcgggccaggccgctgcgacaacaccgcgggttcgttccactgtgcctgcccagctggcttccgatcccgaggaaaaaaaaaa

SEQ ID NO: 1973 - DNA, 514 bp, Homo sapiens
cacatttaacgcctctgtgcattcagcacacaccatccgtcacccggggagatctcatcaaattgttctgtatcgtcactgtggaaggagctgtgctggacccagatgacatggccttcgatgtatcctggtttgcggtacactcttttggcttggacaaggctcccgtcctcctctcctccttggaccggaagggagtcgtgacgacaggccagagggactggaagagtactgtcagcctggagcgagtgagcgtgctggaattcttgctgcaagtgcatggctctgaggaccaggactttggcaactactactgttctgtgactccctgggtgaggtcaccgacaggttcctggcagagggaagccgagatccactccaggcccatctttataactgtgaagatggacgtgctgaacgccttcaagtacccgctgctgatcggcgtgggcctgtccacagtcatcgggctcctgtcctgcctcatcggatactgcagttcccattggtgctg

SEQ ID NO: 1974 - DNA, 272 bp, Homo sapiens
gctgtctcatgaccccacagctccaagcccaggcacagtcacccctgtgccacctccacagtgaggaaccagccagccatctctccccctcactccccatggagatcacagttccaggaacagccctcccccactactgggaccctccctcagcctgaagagttcatcacttacgtaaggaaagctcctcctgccccctcaccacccccaccatgcccagcagaggtgtgcagttttatatccaattattatccacggacttctgactaaaa

SEQ ID NO: 1975 - DNA, 153 bp, Homo sapiens
gactgagattgttgttataatgagaggattgcctggcagtggaaagacacatgttgcaaaacttatccgggataaggaagtagaatttggaggacctgcccccagggttttaagtctagatgattatttcatcgctgaagtagaaaaaaaaaa

SEQ ID NO: 1976 - DNA, 282 bp, Homo sapiens
  misc_feature (1)...(282): n = A,T,C or G
tctgcagggagactgctccaaggctcagcagaagctaaactggaagccccgcgttgcctttgacgagctggtgagggagatggtgcaggccgacgtggagctcatgaggaccaaccccaacgcttgagcccctctgcagagactcgaggggcatggtggacagtgcagagccaggggaaccagagtccagtaactccntgccaaccatggaccctcgaccctcctgtgctgtcccntgtatccagagctggcccncagaggtttgtagagcctgggacagga

SEQ ID NO: 1977 - DNA, 417 bp, Homo sapiens
  misc_feature (1)...(417): n = A,T,C or G
catcgaagatgagatcaaggataactcagatgcttntaacaacaacggatttattgcacccaatgaaaatccaaacccagaggaggctttaagagaggatgctgctggatctgaccgagaacctgaacgaggatgacagcncagactgtgatgatgatgctcaaagagaaagaaacnggggggattcagcgcacaggctgcagcagcagcagccgnanaatttantgatngacacgtgattaaagtagcatttacctaancattgaggtatttgtttaaaattcagttcatccaaaatggagtaatatgctttacgncagtgtgtaaccaagcacanaancagnanggatgttgaaactgcgaatgctttncgttnactgtgatgtgctactgcaantataccctctttaattactt

SEQ ID NO: 1978 - DNA, 209 bp, Homo sapiens
  misc_feature (1)...(209): n = A,T,C or G
gagacgcgccggagagctggccctcctgtctctgccatggcctcgtcagtgtcctggggttcttgctgctgctgctcaccttccccatttccggctggtttgctctgaagattgtgcccacctattattttggtttttttttttgtaaagcttaancagacaaaaaaatctacatnttntacttgngcctccatacttaaaaaaaaaaa

SEQ ID NO: 1979 - DNA, 548 bp, Homo sapiens
  misc_feature (1)...(548): n = A,T,C or G
tgaggttttacctgggaggccccacgagtgtccgaggatttagcatgcacagcattggaccccagagtgaaggagattacctgggcggcgaggcctactgggctgggggcctgcacctctacaccccactgcccttccggccaggccagggtggcttcggagagcttttcagaactcactttttcctcaatgcngggcaacctgtgcaacctcaactatggtgagggccccaaagcccatatccggaagctagctgagtgcatccgctggtcctatggagcaggcgtcgtcctccgacttggcaacatcgctcggctggagctgaactactgcattcctatgggcgtgcaggggggcgacaggatttgtgatggtgtccagtttggagctgggattcggttcctgtaacttgagtcccaggggcagcttggatgagaaacaggcatctcccaggctccaagcctatttggaggtgacacggttgagtgcttctgggccggaatccttatgggaaatcacgtcaataaattttaaacgctcatataatg

SEQ ID NO: 1980 - DNA, 324 bp, Homo sapiens
  misc_feature (1)...(324): n = A,T,C or G
attgaggtctaagatncctntactgaaaagcagcttggcnacncancacagcaanntaanaggatttcctgacccagtttcancaacctcgntgatngcnccnaggnagaggatgcnttgcggatcanagccaaaggggctgcngaagacagacntgtatcacnttcagaagnccttactnnaaatgaaagagctanggagaactangaagccaaccangctngaantgctcanagaaaatgnnatgaacttnatcgacaacttagngagagactaccttctgcctcctgagagccagactctgcatgaggaaatcgtacttca

SEQ ID NO: 1981 - DNA, 398 bp, Homo sapiens
  misc_feature (1)...(398): n = A,T,C or G
cggcggtggacgtccgcagtcaccatggccatcagnntggctccagggtagacgatgcagctgtgcggctctcgttttactgaagtagagcgcttccccaaggccctggaagtgaccgagagtcccttggtgaaggccgtnttctatacctgtagagccatgcatgcctccctctctgggaaagctgacggccagcagaactccttcngtcactgtgagagggccagtggtcacctgtggagcagnctcancgccagcggctactacttctgatncttcacttaaccatgtgatccaacngttcacctgngacctgctactgnctgctgangacagccactctggcnnaagcaggccagtgccagccatctcnctgggtgagacctaccatgcatccg

SEQ ID NO: 1982 - DNA, 408 bp, Homo sapiens
actgagaaaaaaagaccaaatggccaagcaaccttctgatgtaagttctgagtgtgacagagaaggtggacaattgcagcctgctgagaggcctccccagctcaggcctggggcccctacctccctacagacagaaccgcaagacaggagcccggcacccatgagttgtgacaagtcaacacaaaccccaagtcctccttgccaggccttcaaccactatctcagtgcaatgggtaagccatagctgggtaagaggcagttcatgtgtgcttgtttgaatatcggtttcaaggctgtggggagcatttaaagcctcatagaatcagtcaagtgattcattctatattttgatagaaacaagatgtatggagatctcaacaatttttttttaacttgcaaaaaaaaaaa

SEQ ID NO: 1983 - DNA, 315 bp, Homo sapiens
  misc_feature (1)...(315): n = A,T,C or G
cccctccctatatccccatccgaaaacganaccagcaggggcatgatntgcagttcccatggtgcacgtctaccttcctcattgacctgcgtaaggctgcatccaggaacctggccttttacccaccacacccagactacacctggtcttttgacgacatcatcgtctttgccttctcctgtaaacaggcaggtcttcatgatcaacctgaagcggaggcgggaccggcgagaacgcatgctgcgggcactacatgagcaggagattgactgccagctggtggaggctgtagatggcnaagccatgaacaccagc

SEQ ID NO: 1984 - DNA, 395 bp, Homo sapiens
  misc_feature (1)...(395): n = A,T,C or G
ttttttgtggtgcttttcagcagtantgcaactccagcnacatcatggacctgttctgtatcgccaccggcntgccncggaaaacannaccctagaagaacagagatgcaaaagacagtgaaggccattctcctccaaactgatggacatcttaatgtgtgcacagactgtaccagttagagcagatgaattgtggcctgtgagtggacagagccaagcgaggcttcccaggatcttccacacanggatggncacgcccagacgacccctgatganctgntacagaccatgntnnctaagaaccattntgtncactgatataaaaacaggaattcacgatgctgtacanaatttttattnttaanctgtctttnaagataatatatcccttatac

SEQ ID NO: 1985 - DNA, 243 bp, Homo sapiens
  misc_feature (1)...(243): n = A,T,C or G
ggtgacaccaagccaattnactgttaggactcaggcaccggctcccccggaatgaccaggctntttgaacttaagtcaaanggncagaattgcaggccaatcaagatagccacagcncttgccagatgacatcatcacgcagngggaggactcagtnggggccatggaggatgaggagcacgaggcatgtatgngggtgagcaggagtcagcgaccacagaagcccgacctcggaggcggtag

SEQ ID NO: 1986 - DNA, 382 bp, Homo sapiens
  misc_feature (1)...(382): n = A,T,C or G
cgcattacaagtttcagaaaaatctgccaccaagcaggagaaaagcctgttattcaacattctattgattatcaaactgcagtggttgagattcccccagctctgatagtacatgatgaccgatctttgattttgtctgaaaaggaagttctggacctctttgagaaaatgatggaagatatgaaccttantgaagaaaagaaagctcctttgcgaaagaaggattttagcatcaagcgtgagatggttgtccagnatatttctgctacttccaaatctatagctggaantanagcnctggnngncctgaangcannaaacatgannncaccctgtcttcacaagannatnttcatgaattatgacctgacatcacagatga

SEQ ID NO: 1987 - DNA, 494 bp, Homo sapiens
  misc_feature (1)...(494): n = A,T,C or G
actgagctgtgggcaaatcccctttgtgaagttactcatgaaaactcacccagagtggcaggtggcgacagaacctatagcagcatggcagaatattcaggctgctggagcccaaaaagangncacttncaaacgtntngganacttgctagaaatgatgtaccaggagccagcaccgatggtcctacacattccagaccctttctttcatgagccgtctgaaggtgcngctggagcccatcccagggagactcctgcnggcagagaantntgtgcggntctttgagaggtntgngnacagngacaggtatatctttgtanagantctatttgaaaatggttgcntcagngacatcgagtggnacatctatcagtgactggcnttcctttntnntgcaggagttnnnaanccggcttttgttacacggnttcatctatctccaggcttcaccccaggtttgtatggagagactctaccagagggatagagaaga

SEQ ID NO: 1988 - DNA, 253 bp, Homo sapiens
  misc_feature (1)...(253): n = A,T,C or G
gactgagctgactgtattcacaaccttgntggatgttaccaaaggtcaatttgaaagtcaccttcgagattgcccagacccttgtataggctggtgagcacacgttggccagcctcgaggacgtactgagacccgaagatgtgttgtgcagcgagcgtgcctggtctccttccataggctaaggctcaaggcctcttgtctttagtcaggactgccctcatcatgttacattgtttacaggcaaaaaaaaaaa

SEQ ID NO: 1989 - DNA, 492 bp, Homo sapiens
  misc_feature (1)...(492): n = A,T,C or G
gagggagaggctagtggtaacaggccgagctggatggatgggtatggggagaggggcaggacgttcagccctgggattgtggccgaccctcgccttccttctctgcagcttccccgcagccatctccccctgcaaaatcctcaagtgcaactctgagttctggagcgccacgtcatcaggcagccacgcccctgcctccgacgacgtgccggagttctgtgcagccctgcgcacctacgccctgtgcactcggcggacagcccgcacctgccggggcgacctggcttaccactcggctgtccatggcatagaggaccttatgagccagcacaactgctccaaggacggccccacctcacagccgcgagtgcgcacgctcccgccagctggggacagccaggagcgctcggatagccccgagatctgccactatgagaagagtttccacaagcactcagctgnccccaactacactcactgcggcctctttgg

SEQ ID NO: 1990 - DNA, 329 bp, Homo sapiens
  misc_feature (1)...(329): n = A,T,C or G
gttgtgctaggatgtctagntaggggccccctttgcttccctggtggccactggtattgtgtttctttggagtggcactgttctgtggatgtggacatgaagctctcactggtacagaaaagctaattgagacctatttctccaaaaactaccaggactatgagtatctcattaatgtgattcatgctttncagtatgtcatctatggaactgcctctttctncntnctttatggggccctnctgctggntgangncttctacaccaccggcgctgtcaggcaganctttggagactacaagaccaccatntgcggtaagggcctgagc

SEQ ID NO: 1991 - DNA, 282 bp, Homo sapiens
  misc_feature (1)...(282): n = A,T,C or G
acgatttcctatggaaantaccacagcagaaccacaagtttctgaggccgtgtatgactgtgttatttgtggacagagtggtccttcttntgaagacagacctacaggactggttgtacntgntacaagcatcatcagttttaggccagtgccgggacaatgctgagccaaaaaagttgccgatcgctgaagaggagcagatttacccttgggacacatgtgcagcagttcatgatgtgaggctttcattactgcagccgttattttaaagatgaggttgtt

SEQ ID NO: 1992 - DNA, 473 bp, Homo sapiens
tgagctcctgaagaccaagaagggccagtctacttcccgccataaaaaaacaatggtcaagaaagtggggcctgactcagactgactgcctctgcatcccgtccccatcaccagcctccccctctccttgctgtcttatgacttcagggcgtgagacacaatcctcccggtcccttctgctgccttttttaccttgtagctagggctcagccccctctctgagtagtggttcctggcccaagttggggaataggttgatagttgtcaggtctctgctggcccagcgaaattctatccagccagttgttggaccctggcacctacaatgaaatctcaccctaccccacaccctgtaagattctatcttgggccctcatagggtccatatcctccagggcctactttccttccattctgcaaagcctgtctgcatttatccaccccccaccctgtctccctcttttttttttttt

SEQ ID NO: 1993 - DNA, 505 bp, Homo sapiens
  misc_feature (1)...(505): n = A,T,C or G
ggggggagcaattaaagcaatcgctnaagatgaagcagtgatgttggtgaaccaccaggcaactggagatgtgtgtacattgatgatgtgcctacaggataaaggaccggttgtcgctcanatgatgtggctgatggatcatattttcaagtatacaaactttggaattgtttctcttattcatggagacttntttataagacaggnaagancctaccgcgaccaacagctgctggttctcaagaagcaccttgaacataattacaggagcaganatcnaaannggatcgttttgtttccggaagggggcttcctcaggaagaggcnagaancaagccaggcattngccnagaacaataaccttgnccatttcttacacatgtcactttngccaaggtttggnggcaaccatcattattntancaangcacttgtantangnccagnaaaatggaagcnnagnatgaggagacgctanaggcttanancgcaaatcaagaggcct

SEQ ID NO: 1994 - DNA, 289 bp, Homo sapiens
  misc_feature (1)...(289): n = A,T,C or G
cttagtgatgggttggatgaagtncaaaaagcagaaatgaaagcctacatggaattagtcaacaatatgctgctgactgcagagctgtatctccagtggtgtgatgaagctacagtaggggagatcactattgntaggtatggatctccttacccttggncctntgaaccacattcntggcccnatcnnaagcagtgngangngaaacgcaagatganngctattggatggggnaacaagactatggaccaggtcttannaanatgtagaccacagctgtcaagccctt

SEQ ID NO: 1995 - DNA, 457 bp, Homo sapiens
tgtccaaagtaatggagatgttccagcctagtgcagtggtcttacagtgtggctcagattccctgtctggggaccggttaggttgcttcaatctgaccatcaaaggacacgccaagtgtgtggagttcgtgaagagtttcaacttgcccatgctgatgctgggaggaggtggctacaccatccggaatgttgctcgctgctggacttacgaaacagcggtggccctggacacagagatccctaatgagctgccctacaatgactactttgaatactttggaccggatttcaagcttcacatcagcccttctaacatgaccaaccagaacactaacgagtacctggagaagatcaagcagcgtctctttgagaacttgaggatgctgccccatgcccctggggtccagatgcaggccatccctgaggacgccatccccgaagagagtggggatgaaga

SEQ ID NO: 1996 - DNA, 424 bp, Homo sapiens
  misc_feature (1)...(424): n = A,T,C or G
gcgctgtgtgagagaagagcactccgccgtgaacatgaacctgcactatgtggagaacggcacggttatgttaaactttatttaccgcaaagagctctttttccttcctttgggatttgcacttaagggtttctggagttgtggaacctgtgagtagcctgattccatggccacattgaagtgtttgaggtgcttgctgggcctctgagatggctcctccgggaaaagcacctggcacgcaagacagacaagacaacctgaactcagcccccagcacccacagnggaaggagagacctggctccccagagcctgtcctccttcacctccggatgtgtgctgnggcctgtggacctacacacatacacaggcattacattctctccctcttaaagaattaaaacttgatagcaaatgaaaaaaaa

SEQ ID NO: 1997 - DNA, 477 bp, Homo sapiens
cattcttggctctttccaaatatcaagatggcaagaacagctatttgcaacctcatcctaggaaatcctccatcaaaggtgtatggcaatatccgagctgtggccagcagatcagcagatcggttctgattttccatgaacccttgagatgttcacataaaaccatgggaagaatttcccagccacttagagctcaggtttcttctcagctctcagccagagcagaagcataaaaggaaggtttaacaggacttgtactcagctgcttctaggataatttaaatatgatataatactgaaaagtacagcagtttataagtgtaagtaagccacacgggcagatgcacaggttacaaccctatcaattagaggtaactgcttgcttacaactctttggttacagatttacagctaaacttataaactttatataaactgaaatttttaattaaaaatgaatcacaattcttggtgcca

SEQ ID NO: 1998 - DNA, 220 bp, Homo sapiens
  misc_feature (1)...(220): n = A,T,C or G
tgccctatcagagataagaacgttatcctggaggtgaatgaggctgttctcacagagtctatgatccagaacctcattaaacagatgccagagccagagcagctaaagatgctctctgaactgaaggaggagtactgatgatctggctgacctagaattagctctgaagaccagggcgtatacagaganaccctgtctcgaaaaaccaagaaaaaaataa

SEQ ID NO: 1999 - DNA, 347 bp, Homo sapiens
  misc_feature (1)...(347): n = A,T,C or G
caataagcaacattgctaacccgactgccacactgctagcaagctgcatgatgctagaccacctnaagctccactcctatgccacttccatccgcanagctgncttancatccatggacaatgaaantatgcataccccagatattggaggccagggcaccacatcccaagccatccaggacatcattcgacatatccgcatcattaatggactgggcttgtggaggcttaactatncctacagttntgctcagcttgtctgtaggactctcttntcactttancactncanctagcttgggggacaggacccagaataaagncacttctgttccagaaaaaaaaaa

SEQ ID NO: 2000 - DNA, 250 bp, Homo sapiens
  misc_feature (1)...(250): n = A,T,C or G
ggaacatctcatgcacgggatcctcactgagaagcaaatgattttcgttccgagttccatagcacttctgacagtattggaaaggatcgtccctgagaggttcctgcaagtcctaaaacacaggatcaacgtcaagttcgatgcagttgttgggtacaaagacaagngacgcagcctgctccggttccctgaaagccgattgactggatcaaagttgatttcttctaatattaatcaaaagtttgatgtt

SEQ ID NO: 2001 - DNA, 489 bp, Homo sapiens
actgagatggaggacgaggattccattctgccccggagcttcaggttgccctggaacacattctggagcagaggaatgacctggcctgtgaccaggatggaggcccgctggactgtgtgcacggccctgaatccagttccttgagtgaggtggtgtccgaagcctttgtccgcttttttgtggagattgtgggccactaccccctgttcctgacatcgggtgaggagagaagcctgcaacgagaggccttcagaaaagctgtctcctctaagagcctgcggcgcttcctggaggtcttcatggagacccagacgttccgtggcttcatccaggagcgggaactacgcaggcaagatgccaaaggtctgtttgaagtccgagcccaggagtacctggaaaccctgcccagcggagagcacagcggagtcaataaattcctcaagggactgggcaataaaatgaagtttctccacaagaaataaccctcat

SEQ ID NO: 2002 - DNA, 345 bp, Homo sapiens
  misc_feature (1)...(345): n = A,T,C or G
cgcccaaggaccctcacagaggctctggctctgcaatcagganagacactgctcttggacccaaggaagctgcagctctccagagctggaccctgaaagcctcttaggactcttgggaactaatgaccttacntatgaagaaggngctttgaacggctgcaggaagcaggagtgtggttctggttccagtcctaggagccaccctgtccaaccagagttggaaatctgaggccatggcagggttgagggaaccccacagtgnggtgggaacttcctaggacatgcaaggtaaagactggatgnntactcaattacacagagntgnggtgtggaaaaaaataacct

SEQ ID NO: 2003 - DNA, 260 bp, Homo sapiens
tgctcagtttgtgagagactacaaggcacccagccacactgcggcaacacgagaagacacactggttgacccgtccgttcccctgcaacatttgtggaaagatgttcacacagcgaggcactatgacacgccacatgcggagccacctgggcctgaagccctttgcctgtgatgagtgtggtatgcgtttcactcgccagtaccgcctcacagagcacatgcgtgtgcactcagtttttaaaaattcttttttaaaacca

SEQ ID NO: 2004 - DNA, 303 bp, Homo sapiens
  misc_feature (1)...(303): n = A,T,C or G
tgaggtggggtctttcactgcaatgccccgcgggcanatccgcgtcgngtaggctctactgccgccggcccaggcccggggaggcnancggttctaaaccgnntcttcatgtctgngggaancctaaaatccagcgngttctccacnnagccagcanagaagtgtgacagaaggtgacagcaggaagaggtcacctggaaaatgntgggcccactangaaaaaagcatggaaagnnccncagaangnnnatgnagncatgttcactantgtctttacttgctcaggctgtgctcgtctattga

SEQ ID NO: 2005 - DNA, 512 bp, Homo sapiens
  misc_feature (1)...(512): n = A,T,C or G
gactgaggatgtagtcagaggggattgtcgttcagcactactggccctgtgtagagctgaagatatctgagaccttcctgacccaccctgacgcgacactcgaaaccgctgagattcccatatttggttgaaaacatggaagaaccccaaggaacaccatgcaccctggcctcctctcgaggctggacctctgagttcccttggatttccctcttctcagactggcatcttccagctccattctagagaggagtaacgggagttctctgacagtctctgccctgctcaatccctcctaaggccagaacatctccctgggagtcaaatgttttggcagttcaccatctttttgtttcctggttaaagtctgggtggaggaggccatggatcaggaggaggccatggagttgaggtgcctttgaagtatgctcagccattcaacaggaatcctgtttttaccccagnactgcacttaacagntaccaacacaccccactcctggatcttccgaa

SEQ ID NO: 2006 - DNA, 200 bp, Homo sapiens
  misc_feature (1)...(200): n = A,T,C or G
atcaatagaaattaagaaaatcagatgtgnggaaaaagtcaaccttgaggagcagacaccggtggngagacagtacccatttcagattgngtataaagatgggcttntttatgtctatgcatngaatgaagagagccgntgtcagtggttaaaagcgctgntaaaagagatacggggcaaccctcacctgttgatcaagt

SEQ ID NO: 2007 - DNA, 319 bp, Homo sapiens
  misc_feature (1)...(319): n = A,T,C or G
aaaaggatgtcattccgtaaagtgaacatcatcatctgggtcctggctgctgntctcttcttactggttttgcaccataacttcctcagcttgagcagtttgttaaagaatgacatttcagattcgggaattgtggggcttcagcccatagactttgtcgncagtgctcatcagcatccagngagtgngaggcaagaggagattcccgtggntattgctgcctctgaagacngnctgntgngggaccattgcagccataaacagccgttcatcanaanacgcccnccaatgtgatgttttacattgggtacattcaaca

SEQ ID NO: 2008 - DNA, 283 bp, Homo sapiens
  misc_feature (1)...(283): n = A,T,C or G
tgcagcaacgccaatcaagttaagcaagccgggaagaactcagtgaggagtatggatgcctgagaaaggttgccgcagacgntcatctccttgacttccccncacttcncttccatctnagggnagacttcctcaaagaactcatnatagtgctcctgcatctccacgncgntcacagcacagcgcacaccgtaagcagactgnaaagggttttgagggtcanggnanatgttcaagagggcagtggtcnggctanaggtngggcttattgtgcaaatcgtct

SEQ ID NO: 2009 - DNA, 338 bp, Homo sapiens
  misc_feature (1)...(338): n = A,T,C or G
tgcagcagaagccagccctgcctacaacggagcccccaggcctcccgatgcaccatccccgacgtgcacctgttctccacggtgctcctacatgctaaatgtcactgctgtgtacccaggcggctgccagcagcagcctcctagcctttgtggctgagcgaatnatcaagccggacccttcggaaggcgtgcgctctgcgcacagcgnnacagngcctgcaggtgntctggtatnccnctgntncgtggccnttccccgnacatcttntctctcaagtaccgacnccgctaccgnngccgaggagcctcacacnttacgacaggggggacccattgaa

SEQ ID NO: 2010 - DNA, 159 bp, Homo sapiens
  misc_feature (1)...(159): n = A,T,C or G
catgaagaacttcaagctgaaggctttccctgtccgtgccncgcccagagaccattgaggagnngtnggnatgagntcacntgagcagttnaaccanctccacactcagacganngaggatggcacagatgaanctgancagctgtctcctggcatgca

SEQ ID NO: 2011 - DNA, 180 bp, Homo sapiens
  misc_feature (1)...(180): n = A,T,C or G
tgaggatgacagcgatgggatcccgtggtcagaagagagagttgtacgaaatntggangagagaacggtagtgtccgattccgccctatttatgtntntactcnggaacaaacnttggttgcgngttgagtgtgtgtttccttgtgttggttttttaaagaaacgggaagaagaaaaaaa

SEQ ID NO: 2012 - DNA, 208 bp, Homo sapiens
  misc_feature (1)...(208): n = A,T,C or G
tgagtgttacaagcctgcaacgaagccagnggaagtctccttacttttcatcccagtgctttctgcctttaatctcagcccttgggaagcagacccaggtggatctctaagttctaggccggcttggtctatagagtgagttcaagcacaaccagggctctgtagagagacactgtctcgatcaatcaattaatcaataaaaaaataa

SEQ ID NO: 2013 - DNA, 444 bp, Homo sapiens
gactgaggttagctctctggggcttagaggactactgtcatctgcgattagagcctcatagaaagcccgggcagcagccccgtccaggacaggctctgctttctcctgctgtggttgctgctgcccatccttccagaggtcactggagtcagccgctggggtaaattcgatgaaggatggcctagacatgcctgtgagagaaacaagaaaatgaagactgggcaaggcaaggatgtgacaagcaagcgatccaaccattcaggtagctattgtgaagatgaccagcaccacctctgggggcccgctgagatgggaaagcagcctagaactaaaatgggcctcccatcccaaaactgacttcatagttaggattctgtggagcccgggcctcatgggtaaaagggaccccaggaataacaacagatcctgtaacgatgggatggg

SEQ ID NO: 2014 - DNA, 499 bp, Homo sapiens
tgaggtctgctgctgaacaatgaccactgagagcaagcacaggaaatgtggagcccagagagacctgacacacagcaggagaacctctcctattcagccctctttcggtccatgggctcacgagggacagacggcctctctcgcgtgtgcttggaggagaaactatatgaatgaagtgagccaatgaacttgcaagctccagatcccggaggtgtgaagtcgtccatagaaatgccgctcttgtctgccccctcagcgtcggtggaggaagaggccttctggtggtcagcctctgtagcagacgcttgtgcctcttcctggcctctggccaatggggcagccgggtcatctcctggagttttttccagagactgaccctgctcctggctgacagcacctggggtgaccttgggggctgcatcatcttgtagagaagctcgcttcaactttcgggactctggcttggccatcaagttatcacttgaagacagtgaagatc

SEQ ID NO: 2015 - DNA, 511 bp, Homo sapiens
  misc_feature (1)...(511): n = A,T,C or G
ctgagctgcccctgtcgaacagcctgcagctgancctgtaccagtacaagacatgtcccttctgcagcaaagnccgtgccttnctcgacttncactccctgccctatcaggtggtggaggtgaatcccgtgagaaggactgagatcaaattctcctcctacaggaaagtgcccatcttggtggcccaggaaggagacagctttgcaacagctcaatgactcctctgtcatcattagtgccctcaagacctacctggtttcagggccatccntgncngaggnnangacntatnacccactttatgaangccatgaatgaccagggcaaggaggngaccganttttgcaacaagtactggctcatgctggacgagaaggaggcccannanatgtatggcnggaaggaagccaggacgganganatgaancngccgcagnnggcggatgantggctgntgcatnctcatttcttccnaatgtgnaccgnacacccgctgaggccttggctaacc

SEQ ID NO: 2016 - DNA, 503 bp, Homo sapiens
  misc_feature (1)...(503): n = A,T,C or G
actgagtagaagaaacataacctatagcagnccatcttctggcagaagatgatagatttgaatcagaaagaggaggtgttggaagccaggaatctaaagtgaagaaactctgcaagcccctggagtcctatcactctcaccatgccagaaatgacagagcatgagacgcctacgaaaaagcagcacaggaagaagaaccgagagacacacaatgcagnggagaggcacagaaagaagaaaatcaatgctgggataaacagaataggagaactgatcccatgctcccctgctctgaaacagagcaagaacatgatcctggaccaagcctttaagtacataacggagctgaagcaggcagaacgatgaactcctgctcaacggagggagcagcgaacaaggtggagacttggccgagtcttgctgtntcctgtttgtgttgcagcgacatgcattgaggacatggaaagctcccccaaccctcaactcatgaataggcttgcctt

SEQ ID NO: 2017 - DNA, 303 bp, Homo sapiens
  misc_feature (1)...(303): n = A,T,C or G
gatgtgcgagcagcttagcncgactgnatncaaactactacaagcacatgtaccctcgccccngagacaccagcttaagnggcctgtccgngnaagagtacaagctgatcctgtccacagacactttggaagagttccaagagatgaataagagcatgtggaanaaactgcaggagaagtttgcgcccaccaggcctgaggagaagcacaaggcctggactcgggtcctgtcccgcccacggacctgaccgtggggtctgatactcatcaataaaactgcctggtttctcccaaaaaaaaaaa

SEQ ID NO: 2018 - DNA, 164 bp, Homo sapiens
  misc_feature (1)...(164): n = A,T,C or G
tccttgtattcgaaatgtgacttcaccaacaaggcagcatcatattgaacgagaaaangaccatagttcttctcgtccaagcagtcctcggcactctgntnactngaggtngnnctggnaatcggttctactgnctttcgagcntatcttggattactataagc

SEQ ID NO: 2019 - DNA, 207 bp, Homo sapiens
actgagctcttcccgtccgtgttcctgggattcggtctctgatgggtgaattttatgatatggcaactcctggctcagtcctgtcgcagtactggtcccttttaaatgtatttgaacaattttggctcatgaataaaaaggcacagctacagccactggaatggtaagagagccacaaatctgaattgtgcaatccaaaaaaaaaaa

SEQ ID NO: 2020 - DNA, 246 bp, Homo sapiens
  misc_feature (1)...(246): n = A,T,C or G
ctatgactagcctacgttgncganttnncctgggcngtganggacacttgangttacncananancngacannncactgannactccnggtacttgtctgatgtantntaccaacataccantccataacngngagaattatgattatnaaactgagccacaatatggatttcaaattttgttggaccaccagaggaagtaagttctttcctaaaaaaagattttaaaagttttcaaaaaaaaaaa

SEQ ID NO: 2021 - DNA, 178 bp, Homo sapiens
actgagactggacagccttggcatttgtaaacgcagcaaaatcaaagggcctgaagagtttagaaagaagggaatctacaacgttctcacgatgacagaagaactgttgaagctctttggtcatgatgtcctccatataatgcccaataaacacctttctgcttctcaaaaaaaaaaa

SEQ ID NO: 2022 - DNA, 165 bp, Homo sapiens
  misc_feature (1)...(165): n = A,T,C or G
caagagtcccatctttgctggggtggttcttcctnaagttcancacccananaccgcaagaaagaaataccccaagctcaatggattgctggcagatatagttcatgctctgtnnacgncttgatnctgcnnaaaggacatcatctacgtgatctttcgcgccac

SEQ ID NO: 2023 - DNA, 523 bp, Homo sapiens
  misc_feature (1)...(523): n = A,T,C or G
gtttacacgtcccatggtatatatagncaactaggagctggannacagactcgctgacntcctgcagcacaatcacccggntgngagcctccttcaggttggatgtgaacatggatctggaagaagcagctctgagctgacaggaccagccggtgcagctgaaactctcggccttccactgaaatggtgacatnagcaaagagctcctcctctaaacacagtttcatgatgccctgagccactcggnctgagtgagaccggtctttgaaagtatagttcacaaagnagttttcatccatggatgctccangctcctctggtgactccatggnagccaacttctctctttgccanctatctgcaaagcaatatcaccctaagtatttgggtaattcacagacacagtccatgaatccaacctgtncaagccaagacagggngaagggagacactggngcaaagcggctccagaatgnccttatttctgnncttgccaatgtggcctangccattcctccagttt

SEQ ID NO: 2024 - DNA, 440 bp, Homo sapiens
  misc_feature (1)...(440): n = A,T,C or G
tctgaggagcaaatccagaaccgttntggnccacctaagaagagtgaaagacttgaagaagagacggcgggnncagggggagcaggcccgagctgagcttttgagcctgactcagatggagagggaaaaaattgtctgggagtttgagcagctctatcactcgttgaaggagcatgagtaccgcctgttggctcgccttgaggagctcgacttggccatctataacagcatnaacggggccatcactcagttctcctgcaacatctcccacctcagtggcctgattgcccaactggaagagaagcagcagcagcccacgcgggagctcttacaggacattggagacacactgagcagggctgaaagaatcaggatccctgagccctggatcacacccccagatctacaagagaaaatccatatttttgcccaaaaatgtc

SEQ ID NO: 2025 - DNA, 172 bp, Homo sapiens
  misc_feature (1)...(172): n = A,T,C or G
tgaggtctacctcactcctgttagggacgaagcagtctgaatcccaaagaaaagcangatctagacaagcaagacagtctagacggtcaacacagggggtaacactgactgatcttcaggaagctganaaaacaataggaagaagtcgttctacgagaaccagagaacaaga

SEQ ID NO: 2026 - DNA, 258 bp, Homo sapiens
tgaccaagtttaaaaatcacctgtcagatttcttcaagagctccatccctccagcagctatttttgctctttttgtcaccacagcaataatgagtattctttgctgcctcacctttttggtgggtgaaccagtccactgaagaactagaagacttaatgggggaagtgtggtatctgactcaacagattccacgagctggagaatgtgttatatgcttaaaatgagattaaatcatttttccatcttaaaaaaaaaaa

SEQ ID NO: 2027 - DNA, 180 bp, Homo sapiens
  misc_feature (1)...(180): n = A,T,C or G
ctgggccgaaggatcaagtgccctgngncgaggacggggacangtatgcccagctcctagtggagacagataccattngggagtcangnccggatcangggcaaggagacagaatnctacctgtgtatgaaccgaannggcaagctcgtnnggaancctgatggtactagcaaggagtgc

SEQ ID NO: 2028 - DNA, 404 bp, Homo sapiens
  misc_feature (1)...(404): n = A,T,C or G
gaggagaagtgccagaggttagctcaccaaaagcaaactccagtgaggatggccagctggattccgaagattgaagagtaccagttcccactaacttcccagatcccactagcttcccagttcccactagcttcccagatcccactagcttcccagatcccactagcttcccagatcccactagcttcccagttcccactagctttccagcttcctttcctagtggtcacaactttgttttctttaccagtctctgtaactgaattccccccaccctttaatttctaactgtttcatatgagtttacaatgtattgtaatcatgcttatccccattgccttccgttgccccaacctactcctatgaacctcttttnttcccaatagttctctggtttgaaaaaa

SEQ ID NO: 2029 - DNA, 145 bp, Homo sapiens
gtcccaagaattggaatgtctgtcaatgcccttcgcaagcagagcacacgatgaagaagtcacctctctagccaagtctctcatcaaatcctggaaaaaattattagatggaccatcaactgataaagaccctgaaaaaaaaaaa

SEQ ID NO: 2030 - DNA, 148 bp, Homo sapiens
  misc_feature (1)...(148): n = A,T,C or G
tggtctgcctgagacccctccactccgaacagataaaagaaacnatcntgaacaggaaaaactctccaaactgcaggcacaaatgcacattggtgggaaaggaaccggttgtaaaaagaaaatggttcataaaacactcacagcaaac

SEQ ID NO: 2031 - DNA, 149 bp, Homo sapiens
tgaggatttattccacagtcagttaaaacatggtggattactatgaagtgctgggcgtgcagagacatgcctcacctgaggacattaaaaaggcgtatcgaaaacaggcacttaaatggcacccggacaaaaatcctgaaaaaaaaaaa

SEQ ID NO: 2032 - DNA, 116 bp, Homo sapiens
gaactgagattgatgagatgcctgaggctgcagtgaagtcaacagccaacaaataccaagtctttttttttgggacccatgagacggcattcctgggccccaaagacctcttcctt

SEQ ID NO: 2033 - DNA, 105 bp, Homo sapiens
gagaatacggtttctagttttagggtttctgagttacaagtgttactgggctttgctggacggaataaaagtgggcagcaagcatgacctcctgaaaaaaaaaaa

SEQ ID NO: 2034 - DNA, 119 bp, Homo sapiens
  misc_feature (1)...(119): n = A,T,C or G
caatggatttatcaacactgaaatgttatcctcctggccagccaagaaaaattttctgcatttttggataaagttgtnggattacaaaaataaactctcaacactttaaaataaaaaaa

SEQ ID NO: 2035 - DNA, 118 bp, Homo sapiens
gactgaggcagcctgcttctgcaaagtggtacgatcgaagggactatgtattcattgaattttgtgttgaagacagtaaagatgttaatgtaaactttgaaaaatccaaaaaaaaaaa

SEQ ID NO: 2036 - DNA, 122 bp, Homo sapiens
tgcttgaatccccccattatgtacctcacaaatgtagtgaatgggtcaaatgcttttcccaaaaatcccatcttagtattcatcataaaattcatacaggagagaaaccttaaaaaaaaaaa

SEQ ID NO: 2037 - DNA, 138 bp, Homo sapiens
  misc_feature (1)...(138): n = A,T,C or G
ctcctacaaataagatgacgacctcctggagtgnccgnttacagaatgcagcagatgtgcctgctaacatggataagcatgccttgaaaaagtaccgtcgagaagcctatcaccgngtgtttgtgaaccagaagttta

SEQ ID NO: 2038 - DNA, 119 bp, Homo sapiens
  misc_feature (1)...(119): n = A,T,C or G
gactgaggtgacgtgtcctcacttgggnaatggcggctccccagnatcaccctcagtgtccttgtgattgccttgctcacttgctctgtgactgcttatcccaatggcaaagtaccact

SEQ ID NO: 2039 - DNA, 149 bp, Homo sapiens
acgtggaaagaatgggaaggtattggatcaagacagccagtacattgtccatgaacacatgaatattcaagagaagtcttctaaatgggacaagcttagcaatgtcattcttgaatccctccagtgtacaccttacaaaactaaaaaaa

SEQ ID NO: 2040 - DNA, 134 bp, Homo sapiens
  misc_feature (1)...(134): n = A,T,C or G
gaactgagataaacttggacacaggtcagaagctaaggatggaataaatanaacagccttaagggagataaagctnttacaggaactaaggcatccaaatataattggtctncttgatgcattgggacataagt

SEQ ID NO: 2041 - DNA, 108 bp, Homo sapiens
  misc_feature (1)...(108): n = A,T,C or G
gtgtgctcgcatccaactgngatgagcccatgtatgtcangctggtggaggcactttgtgctgagcaccaaatcancctgataanggntgatgacaacaagaaactag

SEQ ID NO: 2042 - DNA, 148 bp, Homo sapiens
  misc_feature (1)...(148): n = A,T,C or G
tgaggttcacgtaacttntcttgtccaatngcaaagcanngnatggaaantttgaggggttnacacatgaatttgcgancttagagttcctcanttaaataagtgtaggcttgttttcagtntcagacctcccgaagctacctaagca

SEQ ID NO: 2043 - DNA, 137 bp, Homo sapiens
tttgctgaatccttcacagaagagtctctacaaagatgtgatgttggagacctacaggaacctcaatgctgtaggcctacaattgggaagaacataatattgaagaacattgtcaaagttccagaagacatggaagg

SEQ ID NO: 2044 - DNA, 126 bp, Homo sapiens
tgtcccccaggagagagtgctctatgtccctgggaatgacgaaaagaaaataaggaagatcccgtccttgaaagtagattgtgccgtgctggactgcgaggatggtgttgcagaaaacaaaaagaa

SEQ ID NO: 2045 - DNA, 147 bp, Homo sapiens
  misc_feature (1)...(147): n = A,T,C or G
aaatacttagtgacattggngttggaatactgtaaagaacatatagaagattttaaacagtttgaacctaatgacttttatttgaaaaacactacatgggaggatgtaggactgtgggacccttctcttacgaaaaatcaggactat

SEQ ID NO: 2046 - DNA, 140 bp, Homo sapiens
  misc_feature (1)...(140): n = A,T,C or G
agaaaaatcctgacagttacaacggtgccatccgtgagaactacatctggtcgcaagactacaccgacctggaggtcagggtgcccgtgcccaagcatgtgatgaaggggaagcaggtntctgcggcccttagcagggcc

SEQ ID NO: 2047 - DNA, 149 bp, Homo sapiens
  misc_feature (1)...(149): n = A,T,C or G
atcaagcagtgcaagtgccattcgggctacctctcgggcatggagctgtccattcctcactgggagccctgataccaccatgtaagcatcaccaatggtctntacctgtggggcgggggagaataaaggacaagctttgcctgcgttaa

SEQ ID NO: 2048 - DNA, 137 bp, Homo sapiens
  misc_feature (1)...(137): n = A,T,C or G
gatccaagcactgaggcngcctgaacccacaccccaacatccttgcacctgcacggaagtagtttttgacagaaaatctggttctcttgcactaatatgtgaacttatggacatgaatatttatgagctaatacgag

SEQ ID NO: 2049 - DNA, 132 bp, Homo sapiens
  misc_feature (1)...(132): n = A,T,C or G
gactgaggaggaagtctttcntgtnttctgcnctgtacgctgcctttatctttggnggtcggcatctgatgaacaagcgagccangtttgaacttcggaagccgctcgtgctctggtcgctgactcttgccg

SEQ ID NO: 2050 - DNA, 103 bp, Homo sapiens
cctggtgctatactggaagcatgcgcccaagtacctgcaagaacttcgcggagctggctcggcggggcctactacaatggcaccaagttccataggatcatca

SEQ ID NO: 2051 - DNA, 144 bp, Homo sapiens
  misc_feature (1)...(144): n = A,T,C or G
ccgtgaccctgcggccctntgncacacctgctggtcaataacctcttatggacattcgnntcagctgtctattggcagaagaatgcagggcagatgaacaagccttcttagtggccctgtataaatacatgaaagaaagaaaaa

SEQ ID NO: 2052 - DNA, 138 bp, Homo sapiens
  misc_feature (1)...(138): n = A,T,C or G
ctgccctgttgcaaatcggngangtgtacttcaaggcacacaaatcagttctcgcttcattctccaattactttaagatgttgtttgtccatcagaccaggtaactaaagtgccttgataataacctaaaaaaaaaaa

SEQ ID NO: 2053 - DNA, 145 bp, Homo sapiens
  misc_feature (1)...(145): n = A,T,C or G
aaaatgcaatggctggaagaccctaacccctctcctactccaccaagaggagacctncagcagataattgncagcttgacagaatcctgtcgaagctgtagccatgcccttgctgctnacgtgnnctcacttggagaatgtgtta

SEQ ID NO: 2054 - DNA, 140 bp, Homo sapiens
gactgagggatattatgataacacactttgagccttccatctcctttgagggactttgcagtgaggttcgagatatgtgttcttttgacaatgagcagccgttcaccatgaaatggatagatgaggaaggatacccatgt

SEQ ID NO: 2055 - DNA, 135 bp, Homo sapiens
  misc_feature (1)...(135): n = A,T,C or G
actgagaactatgttccaacttcctgtcacaatcttggcagtttaagaaaagcccggaaaactgtgaaaaaaantnctnantgncnttgggttggantnctgtaangaccatatagaanattttaaccagtttga

SEQ ID NO: 2056 - DNA, 133 bp, Homo sapiens
  misc_feature (1)...(133): n = A,T,C or G
gagctcctgcattaantcnaactgaggccctccatgatgaatggntngggggcacttacctntanctgnatttgatagtcngggcagnggagagatggntgacagngtcaaaacctttctgcaggaccttggc

SEQ ID NO: 2057 - DNA, 133 bp, Homo sapiens
  misc_feature (1)...(133): n = A,T,C or G
gactgagtatccagtccaatggatcaggatgggaaagatgagacctcagccgtatggtgggactaacccatactcgcaacaacagggacctncttnaggaccgcaacaaggacatgggtacccagggcagcca

SEQ ID NO: 2058 - DNA, 147 bp, Homo sapiens
  misc_feature (1)...(147): n = A,T,C or G
tgagagaccctgggagaaggacaacaagaatgagtgtgtttctggtanatacaccacagggtctgttaaccttcaaggatgtggccttggacttttcacntggaggaatgggaatgtctcagttttgctcagaggtcattgtacatg

SEQ ID NO: 2059 - DNA, 142 bp, Homo sapiens
  misc_feature (1)...(142): n = A,T,C or G
accgtttgtgtgcagtgccccgggctgtggacagnanatttacaaatgagggaccacctggcagttcataaacataagcatgagatgacactgaaatttggcccagcccgaacggcactcagtcatcattgcagattttgga

SEQ ID NO: 2060 - DNA, 129 bp, Homo sapiens
  misc_feature (1)...(129): n = A,T,C or G
gatccccagttactttgggnaanntggtatgcggcattaccacttgagagggaaccagtncttctgcccaacagtcaacctgggtaaactgtggacattgntcagcgagcagcacacgggtcattgcgg

SEQ ID NO: 2061 - DNA, 131 bp, Homo sapiens
  misc_feature (1)...(131): n = A,T,C or G
ggccacgaggagcaagctgcaatgnctgaaagacttncacaaagacatcctgaagccttctncagggaagagcccaggcacacggnctgaagatgaggcaggacggnaagccccctcagagggagaagcgg

SEQ ID NO: 2062 - DNA, 149 bp, Homo sapiens
  misc_feature (1)...(149): n = A,T,C or G
gactgagatcggacccagcacaggcagcgtcaatgcaagcttcccccaccccgtcttccacccatgngtgtcaaccctgcccctggagggaccatcactcgagcttctagggacctattaaaagagtttccgcagcctaaaaaaaaaaa

SEQ ID NO: 2063 - DNA, 120 bp, Homo sapiens
  misc_feature (1)...(120): n = A,T,C or G
tacctgtggagtcttnctgccaaatgacatccattcccctcggcccagtgttcagcatctgacagtgcttgcagaatttcttcggaacaaattagtcaggtgnggccgacactgctgctt

SEQ ID NO: 2064 - DNA, 131 bp, Homo sapiens
  misc_feature (1)...(131): n = A,T,C or G
gcatggggaaggccttgccgggtagcctgaaggcggtaacatgggctncttgnnaatgcccaggctanggctctactgaccagcctcagagcagtnagagaacgagaaggatgatgcctcccaatctaaaa

SEQ ID NO: 2065 - DNA, 147 bp, Homo sapiens
  misc_feature (1)...(147): n = A,T,C or G
cagcattattgtgcagaattcatcagcacattcacagcagaataggcgatggctgggaatggagaacagccaaggaatgttctgatggctncatgtgcaaaacacagtttccaataaagaatgagaccttgacaccacatgccagtg

SEQ ID NO: 2066 - DNA, 122 bp, Homo sapiens
  misc_feature (1)...(122): n = A,T,C or G
gcacccattttccttgcnagcccagtctatgagcaaaccgnaaggaaggcctcgtnttggaanaggaaccccactctgcaggcatcttgcccnaagcgtttcataatcctggcccaggtact

SEQ ID NO: 2067 - DNA, 139 bp, Homo sapiens
  misc_feature (1)...(139): n = A,T,C or G
cctatggtggactacttnttttataggcancanggtgagcagctngggggaggaggaagtggtggaggcggcatataatactaacaanacatcgatggcctacaggggataacattcatgcagaacacccaggtggctt

SEQ ID NO: 2068 - DNA, 134 bp, Homo sapiens
  misc_feature (1)...(134): n = A,T,C or G
ttaaagctcttcacaggaactaagtcatccaaatataattggnctccttgcangcattgggnacataagtctaacantanccttgnntttgactttatggaaactgacctggaggttattataaaggataacag

SEQ ID NO: 2069 - DNA, 142 bp, Homo sapiens
  misc_feature (1)...(142): n = A,T,C or G
ctaaaacgtaaggatgntntttaccgggtgagtgggaacctggccgtggtnccacaaactccgcttcctggtanacagaaaacgggcagngacctctgatggnagatacntgttcccagaacaggcaggacaaggtacttac

SEQ ID NO: 2070 - DNA, 149 bp, Homo sapiens
  misc_feature (1)...(149): n = A,T,C or G
tttaccgggtgagtggcaacctgnccgtggtccannaaactccgcttcctgntactacagagaacgggcangtgacctctgatgggagatacatgttcccagtaacagncagggacaaggtacttacatgggtagctcaaaaaaaaaaa

SEQ ID NO: 2071 - DNA, 122 bp, Homo sapiens
  misc_feature (1)...(122): n = A,T,C or G
ggtttggcggtaccaacancnntgatgcccaacanagcctncagtccttctggcccagggtcatgggaagcaaatccnaaacttaacagtgaaagcatttccgagtacaggaactcccactg

SEQ ID NO: 2072 - DNA, 128 bp, Homo sapiens
caccatgacgactgattctacacatgtggaagagatccccagatctcctgagaaaacatccaaagttgaaaagcctgaacagagaagctcagaggagtgcactcagaaggctgcagagcttcgatcct

SEQ ID NO: 2073 - DNA, 128 bp, Homo sapiens
gtgtgggtcactggcatcagcgagtaccagtcacccgagcattgcagagagaggctattaaagctacagatgtttctcaatatgaagccacaagacctgtgtctggagaatatggtcttgctgctgac

SEQ ID NO: 2074 - DNA, 101 bp, Homo sapiens
  misc_feature (1)...(101): n = A,T,C or G
atacacccatgcagccaacacagtcgtttacagctctaacaaaatagcacgatactattcnttactngtncttgcntgacaataaatacatcagatacttt

SEQ ID NO: 2075 - DNA, 127 bp, Homo sapiens
  misc_feature (1)...(127): n = A,T,C or G
aagggagcgctgtgccccctgggagctgacaaaaaanctgaggctggggctggctcanccactgagttccantttagaggcggntttggtcntgnacgtggntcanccacctcagtgaagttggagt

SEQ ID NO: 2076 - DNA, 128 bp, Homo sapiens
  misc_feature (1)...(128): n = A,T,C or G
ctttgcctttcaggcagaaatngcccagtnaatgtccttgannataaataccttctgactncgaacaaagggatctttnctgagggagctcatctncaattcatgcggacgctctggataaaatccgt

SEQ ID NO: 2077 - DNA, 118 bp, Homo sapiens
  misc_feature (1)...(118): n = A,T,C or G
agtaacagatccaagnagaggaaagagagtagcactcaaaaagatgcccaacgtcttccagaatctggtctcttgcaaaagagtcttccgggaattgaagatgttgtgtttttttaaa

SEQ ID NO: 2078 - DNA, 127 bp, Homo sapiens
gactgaggatcgaaagttaacaaaatctgaaaggcagagattcaaagaagaggctgaaatgttaaagggtcttcaacatcccaacattgttcgattctatgattcctgggaatccacaaaaaaaaaa

SEQ ID NO: 2079 - DNA, 138 bp, Homo sapiens
  misc_feature (1)...(138): n = A,T,C or G
actgaggagtccctggctcctgccccaaacgcatcctggacgggtnacctcanagctgtgaagtggntggacatggaagcgaagcatggaggctgccatggtaacngactcccagntctggggccaccctgcctgtgg

SEQ ID NO: 2080 - DNA, 104 bp, Homo sapiens
  misc_feature (1)...(104): n = A,T,C or G
ggtgagcggcctgccatccaaacgantnactagggaagctatagcgaaattatataaaagaacgaggggatcaaacggngctcattcttcatgcaaaagttgcg

SEQ ID NO: 2081 - DNA, 116 bp, Homo sapiens
gaaacctgcttcgaatcatgagagaaggaaagacgcaaccaagaagctcaccaggagaaggaggcatttcccgagaaggctcccctgtttccagagccttattttaaaaaaaaaaa

SEQ ID NO: 2082 - DNA, 148 bp, Homo sapiens
  misc_feature (1)...(148): n = A,T,C or G
cattggtccaaccactgtncaacaacaactgctcctnaccagnngattnngggtaacacagaggacagcaagaccaacctaatagtncaactaccttnctcagaacatgacacaggaaganctaaagagnctttttgggagcattggc

SEQ ID NO: 2083 - DNA, 109 bp, Homo sapiens
  misc_feature (1)...(109): n = A,T,C or G
ccacaggctgcagaatgtgcagatcgccctggacttcctaaagcagcggcaggtgaagctagtgaatatccgcantgatgtaaccgtctccatccgaggtcggatcctg

SEQ ID NO: 2084 - DNA, 147 bp, Homo sapiens
  misc_feature (1)...(147): n = A,T,C or G
aagaagtgttgctgattgngaagaaggttcgtcannaagaagcaggatggngcactgtacctcatggcagagagaattgcttgggcacctgaaggcgnnagacagatttacaangcagncntatgtatgcgagatattaaatgtgag

SEQ ID NO: 2085 - DNA, 111 bp, Homo sapiens
ggacgccgcggtcaagatgtctccgccatccccacgggacggacggacggacggactccacaagcagtccaccaggtcactgccgcctgcccacagagacggtcggccaca

SEQ ID NO: 2086 - DNA, 136 bp, Homo sapiens
  misc_feature (1)...(136): n = A,T,C or G
agtatgcagtagttcttnggtccgccctntgcaaggactaagtacgagcctctcactgcccgcccntgcgatcaggagggagatcctgncncccgtggacatcatcagacaggaacaatcaccataacatggtgta

SEQ ID NO: 2087 - DNA, 107 bp, Homo sapiens
  misc_feature (1)...(107): n = A,T,C or G
ccagaagataaaggggaggacggacagcccgcagacacagggagtgacntcgattctggcgtccaccttctccaagtctggccgntattttgctttaacagatgaca

SEQ ID NO: 2088 - DNA, 117 bp, Homo sapiens
  misc_feature (1)...(117): n = A,T,C or G
tgagaaagtgaagccaaggaagcttgcgactggctgagagtgactggtttcccccagtatgcacagctgtacgaagatntactgnancntggngntattgtagctggtcaggagaga

SEQ ID NO: 2089 - DNA, 149 bp, Homo sapiens
  misc_feature (1)...(149): n = A,T,C or G
tcgtccatgcaagggctntnnaggnccnctgatcaagctcacctcaagacagcctgntggttttgagatctttgacagccgggcaggatcggaagcagccaaaaacgcattgaatggtattcggtttgatccggagaacccggagacct

SEQ ID NO: 2090 - DNA, 124 bp, Homo sapiens
gactgaggtcctccttctcagaagatgcactattatagtatactcgaacgccgaggtcagctgctggtacaagtacctgctcttcagctacaatatcgtcttttgggtagagtccagagataaa

SEQ ID NO: 2091 - DNA, 138 bp, Homo sapiens
gactgagcgtccgacagtacggccgccgcccccagcgacgtcacccacgcgcgcagaagcggacgccgcggtcaagatgtctctgccatgcccacgggacgcacggacgcacggacggactccacaagaattcacatg

SEQ ID NO: 2092 - DNA, 102 bp, Homo sapiens
  misc_feature (1)...(102): n = A,T,C or G
ctgatcttaaaatgaaanaatacaagcngctccacgtcttaatgaactggnggactacattacaataagcatnaggntgtctgacagagcacacttaccctg

SEQ ID NO: 2093 - DNA, 121 bp, Homo sapiens
  misc_feature (1)...(121): n = A,T,C or G
tttcagattggctcaacactgnagtcatcaatgcacctgagacaatcctaaggactttnttaactacactttggaagagcgggtngangacctaccaagtgagggactgctgacatgccct

SEQ ID NO: 2094 - DNA, 142 bp, Homo sapiens
  misc_feature (1)...(142): n = A,T,C or G
aactgagatttttaaataatacaatgtctaatggggtatgaagaccacatggcggangactgcanggatgacattgggagaacgaatttaattgncaactacctncctcagaacatgacccaagaggaacgtacgaagtctg

SEQ ID NO: 2095 - DNA, 148 bp, Homo sapiens
  misc_feature (1)...(148): n = A,T,C or G
gcttgctgaacccccncagaacttanttgaccagtctcatnctggtacggntaaaacagctgcctttgttttggctgngctcagccaagtanagcctgntaacaagtttgcccagngnntctgcctctctncaacctatgagcttgct

SEQ ID NO: 2096 - DNA, 106 bp, Homo sapiens
  misc_feature (1)...(106): n = A,T,C or G
atatcagtaggaaacaaaaacagacagaaattcntgtgtgaggttcgagtagaagggtttaattatgctggtatgggcaattccaccaataaaaaggatgcacaga

SEQ ID NO: 2097 - DNA, 133 bp, Homo sapiens
  misc_feature (1)...(133): n = A,T,C or G
gtccatctgcaccacggccctggaattgttggataagtatttaatagccaangcaactaatcccanagagtaaggtcttctatctgaaaatgaagggagattatttnccggtatcttgctgaagtagcttgtg

SEQ ID NO: 2098 - DNA, 144 bp, Homo sapiens
  misc_feature (1)...(144): n = A,T,C or G
gactgaggttggtttgcctccacaaatgcagngctgaggggctttatagatcagaatttcagtccaacgaaaggtaacatttcacttgttgcctttccagtttcaagcaccaactcaccaacaaagattttacaaaataaaaaa

SEQ ID NO: 2099 - DNA, 131 bp, Homo sapiens
  misc_feature (1)...(131): n = A,T,C or G
aatgtggaaaaggcgattgagtttgttttgtccctgcatgaactttgatggtggatttgggtgcagaccaggctctgaatgtcacgcctgggcagatctattggntgcacaggattcctgggcataactag

SEQ ID NO: 2100 - DNA, 101 bp, Homo sapiens
  misc_feature (1)...(101): n = A,T,C or G
acctcactgctataggttataattggaaagaccataatattgaagaacattgtcaaagttgcagaagacatggaaggnanttttcatgtgcaagtggctat

SEQ ID NO: 2101 - DNA, 115 bp, Homo sapiens
  misc_feature (1)...(115): n = A,T,C or G
attcagaatggatagtgnaggaagaacctcagaaaaaagtcttcaaggctcggaaaacaatgagagcgagcagatcgccagcagcntcgatgctgtgcacaagcaataaaatcac

SEQ ID NO: 2102 - DNA, 145 bp, Homo sapiens
  misc_feature (1)...(145): n = A,T,C or G
tgaaaacggagtgatggccgaggagaagccagngccccaacttaatgggagcacggnngaccccagagnccccagccactctgaaagtncttgaataatgactnttaaacccgngcaatacaaatcctcacttaaaatgcactaa

SEQ ID NO: 2103 - DNA, 149 bp, Homo sapiens
  misc_feature (1)...(149): n = A,T,C or G
tgtatgatccctttatattttatgtgaccgagaaggcgtggaattattacccatacaccatcacagaatacactngttncttcctgncgaaattctncatccacatagaanccangtatgangacaacaagggaagcaacgatagtatt

SEQ ID NO: 2104 - DNA, 119 bp, Homo sapiens
gtctgttcttaactgaagaagtgattattgagattatggatcggagcaagcggaactcaattgcagggtttcccccacgtgtggagccgtctggaagaatttgaaggaggtggtggagg

SEQ ID NO: 2105 - DNA, 145 bp, Homo sapiens
  misc_feature (1)...(145): n = A,T,C or G
ggaataaaagtgggcgcaagcatgacctcctgatngagggcgttgcatttattgaagagtggcttgcagccctgnggttcagattaaaatncgagaattatatagacgccggtncccacggacacttgaaggactttgtgatctt

SEQ ID NO: 2106 - DNA, 107 bp, Homo sapiens
  misc_feature (1)...(107): n = A,T,C or G
atgtaaagcccaaggtgcacaaccgccagcccanaatcaacttctangtggaggtggcagtgnatggacatcccnagcagagaccaagaagacggggaagccgcatc

SEQ ID NO: 2107 - DNA, 149 bp, Homo sapiens
  misc_feature (1)...(149): n = A,T,C or G
tggcagaccttcttgcaacaggagacaaagggggcagagattgntatttnccagngggcacaagagaaaaaggcngagctcactctagggganngtacaatgttnacagtgcctttcanngtcatgagccaggagatttgactatttga

SEQ ID NO: 2108 - DNA, 109 bp, Homo sapiens
  misc_feature (1)...(109): n = A,T,C or G
ccatgccactggcaacctcatgaaccagatcaagaatcaactggcacagcntcaatggcagcgccaatgctctcttcatttcctattacacagcctcaagaaaaaaaaa

SEQ ID NO: 2109 - DNA, 138 bp, Homo sapiens
  misc_feature (1)...(138): n = A,T,C or G
gggctttgctggatccttatcagaagagtntctntaaaggtgtgatgctggagacctataggaatctnacagctataggttacatttgggaagaacatncagntgaagaccattnccaaactgtctagaggtgatggg

SEQ ID NO: 2110 - DNA, 122 bp, Homo sapiens
  misc_feature (1)...(122): n = A,T,C or G
tgatgaaatggacagtacacttgctgctnagcagnatattgcaacagaacataagggcagactgngtccaanattgacaaaattcttgaaccacctnaaggccaagatgaaggtgtatggaa

SEQ ID NO: 2111 - DNA, 141 bp, Homo sapiens
  misc_feature (1)...(141): n = A,T,C or G
tgcttttgccgactgaggcaggngaaggtaccacaccgatgccagagtggcngnccaccctggtagcccctctggggtcgaggattttaacatgaccccgccnaagtttttgaacacaacatgtgggatcacatgcagtgg

SEQ ID NO: 2112 - DNA, 112 bp, Homo sapiens
  misc_feature (1)...(112): n = A,T,C or G
gagcccaccgctcggngctggctgcgtgcagcagctacttccactcgagaatcgtaggccagactgacgcagagctcaccgtcacactgcctgaagaggtgaggggccacgg

SEQ ID NO: 2113 - DNA, 129 bp, Homo sapiens
  misc_feature (1)...(129): n = A,T,C or G
aactgcctcgaatcgntganttngagctcggnacccggggancaagacatgatangatacattgntgagtntggacaatccacanctagaatgcagtgaaaaaantgctntatttgtgaaaaaaaaaaa

SEQ ID NO: 2114 - DNA, 127 bp, Homo sapiens
tccatcttctcccgctgaggcttagctgccttgctccatgaagtccaggacaatctgacatgcacttgtttctccgagcaaaaagggcgaaggaagctgcagagcaagatgttgaaaagaaaaaata

SEQ ID NO: 2115 - DNA, 128 bp, Homo sapiens
  misc_feature (1)...(128): n = A,T,C or G
gggcgcaggactcgggtagaagggggccagctgggggncngaggagnggaccagacacgggagctttgtcaataagcccacacanaggctggcntgcatnccatgntgccaacttttaaccacaatag

SEQ ID NO: 2116 - DNA, 128 bp, Homo sapiens
  misc_feature (1)...(128): n = A,T,C or G
ggcgctctggataaaatcctgntacgagagcctgacgggaccccagnaaactggactcggngaaggagctgcacatcaatctcattcccagcaaacaggaccgaaccctgaccattgtgggataccgg

SEQ ID NO: 2117 - DNA, 142 bp, Homo sapiens
  misc_feature (1)...(142): n = A,T,C or G
gactgagtttgcagttaacatgttccgaaccttgccaccttcctccaatcccacgggngcagaattcgacccagaagaggatgaaccaacgtnactaacactgtatgtgcaaatgtccgcaataaaacactttccaactttg

SEQ ID NO: 2118 - DNA, 133 bp, Homo sapiens
gactgaggttttgctgtctctaagccttcctggtgacatttctggagcaaagacaagggccttgggatatgaagagacaaggaacggccactgtgtacccaggaataatacccaatgatcctaaaaaaaaaaa

SEQ ID NO: 2119 - DNA, 149 bp, Homo sapiens
  misc_feature (1)...(149): n = A,T,C or G
gagctctcgaggtcgggcacggaagcatggctgggtccatatatcnacgtgcctcgaatngntgaattcagagctcgggacccggggatcaagacatgatnagatacattgatgagtttggacaaaccacaactagaatgcagcgaaaa

SEQ ID NO: 2120 - DNA, 108 bp, Homo sapiens
  misc_feature (1)...(108): n = A,T,C or G
aaggaagatgactccagcctatganantagagcngtangaaacaaaancagacagaaattnatgtgtgaggttagagtaggaagggtttaattatgcctggtatgggc

SEQ ID NO: 2121 - DNA, 105 bp, Homo sapiens
  misc_feature (1)...(105): n = A,T,C or G
aactacactcccagtaccnggcnggcatggcanctggtctccgaagctctttggagactgggaagctnaagtgcngagaataangaagctcattgctggaggtgg

SEQ ID NO: 2122 - DNA, 148 bp, Homo sapiens
  misc_feature (1)...(148): n = A,T,C or G
gatgaaaggctctgctatcacaggtccagtggcaaaggagtgngcagacttgtggcccanaattgcatccaacgcaggcagcattgcatgattctccagtgtatttgtaaaatatattcattaaagtctctgctctgaaaaaaaaaaa

SEQ ID NO: 2123 - DNA, 142 bp, Homo sapiens
  misc_feature (1)...(142): n = A,T,C or G
gcagttttgcgcaaacagaaccttgacctcctggagcagttgcaggtggcaaatcgctancgatccaaagncttgaagccaccggtagagaaacttnttaccagcgagagtaagctgaagcaggctgctctgaccctggagg

SEQ ID NO: 2124 - DNA, 122 bp, Homo sapiens
  misc_feature (1)...(122): n = A,T,C or G
gatgcgtgcactcagggcctatttcaaggccttcctgggcccccgagatncaagagtcnaaggangggncctcctggacnnttncatccctacgttggtntgttcngttatttacttactca

SEQ ID NO: 2125 - DNA, 126 bp, Homo sapiens
gactgagagtgcctaactgccagtcatcctacatgagaggcgggtatttctccagcagccatgaaggattcccgtatgagaaggaccccaggctgtactttgatgagtatttttgaaaaaaaaaaa

SEQ ID NO: 2126 - DNA, 115 bp, Homo sapiens
  misc_feature (1)...(115): n = A,T,C or G
ggtttgatgaaagagcatggcncccactgggaanaatagtgggtggcaccgtttacccaggncttgatgataacagccaggccttatnnattggattttaaatacattgaacata

SEQ ID NO: 2127 - DNA, 120 bp, Homo sapiens
  misc_feature (1)...(120): n = A,T,C or G
gggcagcaaagaaatgggatggagaagcccagnccgctgcttgaggggcaggnagtttgtgangcattattatactttgctgaataaagctcccgagtatttgcacaggtaaaaaaaaaa

SEQ ID NO: 2128 - DNA, 130 bp, Homo sapiens
  misc_feature (1)...(130): n = A,T,C or G
catcaacgagaagcccatcaccatcttccaggagtgagaccccgntaacatcaaatggggtggtgctggngctggngctgagtatgttgtggagtctactggcatcttcaccatcttggagaaggccagg

SEQ ID NO: 2129 - DNA, 118 bp, Homo sapiens
  misc_feature (1)...(118): n = A,T,C or G
ggacccgattcccacgccagcgtccacccgtcacggncgncacccacagngaagtcacccacgagagcgcacacgtagacgctggacgccgcggncaagatgtctccgccatccccac

SEQ ID NO: 2130 - DNA, 136 bp, Homo sapiens
  misc_feature (1)...(136): n = A,T,C or G
tcccccgaactccggctgaactcaaacgaagngactgnnctnttcaagagtggntntcacatttctgnccggngctttctgctgacctacgncagcagtgaccatccagatttnntaacctgtttggaacgaggct

SEQ ID NO: 2131 - DNA, 146 bp, Homo sapiens
  misc_feature (1)...(146): n = A,T,C or G
actctatggtgaggactgatggacatacattatctgagaaaagaaactaccaggccgacaaacagcatgantnggtgcttcaagatanaantttgtanagggggtggaccagngactaccatgatgagaacatgtactacagccgg

SEQ ID NO: 2132 - DNA, 116 bp, Homo sapiens
  misc_feature (1)...(116): n = A,T,C or G
gcgaaccgtgtcaaanggtataggaagtcaggccagcgacagcngtgacagactgngcnatcatccagctgatgaagatgtgagtattcttgggatctgggagcattcctgaaaaa

SEQ ID NO: 2133 - DNA, 111 bp, Homo sapiens
  misc_feature (1)...(111): n = A,T,C or G
ggggaagcagaaactgancttcctgcactggtaccaccacatcactgtgctcctgtactcctggccctaaacccatattcagagggaaaattcactatcaagcctcacagc

SEQ ID NO: 2134 - DNA, 115 bp, Homo sapiens
aatgactgaatgtgtgatctcaatggaataaatggcgtccagagtcacagatgctatagtctggtatcagaagaagattggagcctatgatcaacaaatatgggaaaaaaaaaaa

SEQ ID NO: 2135 - DNA, 130 bp, Homo sapiens
gactgagtgtctccatgtatttccgctcttctcaaccatccagggatggcagaacaaaggatttcagctcctccaacttcaggtccaagcatcctctgaaggagacatgggatggacattaaaggaaaaa

SEQ ID NO: 2136 - DNA, 146 bp, Homo sapiens
  misc_feature (1)...(146): n = A,T,C or G
gtctgggtgaaagaggtntcatgtgtaagatacatcagactacgactccngctgaactcctncagcctacagaaactgttccgagaagtaagaataatgaaggttttgaatcatcccaacatagttaagttgttaaagaaaaaaaa

SEQ ID NO: 2137 - DNA, 125 bp, Homo sapiens
ggccacagccacccagagaccaattccaatgagaagcatctgacccagcaggacacgaggcctgcctgaacagagcctggatatggacgataaggattacagtgaggccgatggcctgtcggaaa

SEQ ID NO: 2138 - DNA, 132 bp, Homo sapiens
  misc_feature (1)...(132): n = A,T,C or G
ccatcattcgaaggagatagagcgtntgcngaagcaaattgaacgccntangangangatccaacacctnaagaataaccattgaatgcgcagcaggcggnccctcacagagtgncccgtatcacttcccca

SEQ ID NO: 2139 - DNA, 109 bp, Homo sapiens
  misc_feature (1)...(109): n = A,T,C or G
caggacccggcttctgantaaatttacgggagaacgacagtgagaaggttgacagactaatggagctgcattttaaatatctcagcgcaatgcaggtggccgacaagaa

SEQ ID NO: 2140 - DNA, 129 bp, Homo sapiens
  misc_feature (1)...(129): n = A,T,C or G
tcatgcattcaggtggaaccaangtattatctgattcctgaagaggaagaggaaaaagaggaggcaaaggcagaaggacnttgagaagcctgatcccacgaagaattcttccaggaagagaaagaagga

SEQ ID NO: 2141 - DNA, 107 bp, Homo sapiens
  misc_feature (1)...(107): n = A,T,C or G
atgcaggcattgcggncgngnncnngangcnncatcctctcctttggctgggcaaccatgtggagatgaccaaaatgcttcaccttcaaagctttcaaaaaaaaaaa

SEQ ID NO: 2142 - DNA, 101 bp, Homo sapiens
  misc_feature (1)...(101): n = A,T,C or G
cgtcaggaacggtagcgattctcacggaggaaggagcacgccaacanngcctgactgcgtacagaaatgccccccctcaataaaattgcagttgaaatgga

SEQ ID NO: 2143 - DNA, 134 bp, Homo sapiens
  misc_feature (1)...(134): n = A,T,C or G
accatgcggttttacgcctgagccctctctggtgttcggcgggaacatcctgcatagcttcaacgtgcccatgcagctgcggatctacgagancgaggacaggacccagantaaagccacttctgttccaaaaa

SEQ ID NO: 2144 - DNA, 140 bp, Homo sapiens
  misc_feature (1)...(140): n = A,T,C or G
aacccactgggggaccgnatnatcaatgccttcttctcagagggagaggatcaggtaaacttccgaggattcatgacaccattgnctcatttccgacccattgaggataacgaaaagagnaaagaggggaatggcccgga

SEQ ID NO: 2145 - DNA, 106 bp, Homo sapiens
  misc_feature (1)...(106): n = A,T,C or G
actgagacagtccaggcatggccgacagtttctgaagnatgcggatnccaggctgggagtcccattgccagagagggactacggnggcaactgcctcatctaaaaa

SEQ ID NO: 2146 - DNA, 105 bp, Homo sapiens
  misc_feature (1)...(105): n = A,T,C or G
gagtgataatagagtgacatccttcagcgncctcattcatgaccaagatgaagaggaggaggaagaggagggacagaggagcaggttttatgctgggggctcaaa

SEQ ID NO: 2147 - DNA, 108 bp, Homo sapiens
  misc_feature (1)...(108): n = A,T,C or G
gggtgaaggggagtcaccacccgtgnncggaacagatgaggcagttgnggctactggtgatgccatcagagccagccgnnccntatncaggaagctgaggccaagggg

SEQ ID NO: 2148 - DNA, 148 bp, Homo sapiens
  misc_feature (1)...(148): n = A,T,C or G
ctttctggcactatcaagaagtatcctgagtnctggacagtctgtgggctgcanngtggatggccgccaccctcatgacatgatagatgacatcaacagtggttngnaggagtgnccagctatgttacagaagcaataagaaaatatt

SEQ ID NO: 2149 - DNA, 119 bp, Homo sapiens
  misc_feature (1)...(119): n = A,T,C or G
attgagactatgcaagctgcgagttgccctactgatgaattatctttaagcaactgtgcggttgtgaacgaaanagatttgaacagaaataaaaatatttttggagaatgaaaaaaaaa

SEQ ID NO: 2150 - DNA, 147 bp, Homo sapiens
  misc_feature (1)...(147): n = A,T,C or G
gctcttctccttgactctgcttccagcttgaaaggtccctgagacagnccaaagacacaccctgtagatcgcctaagggcttggctccaggtaccaanaatgggttggcaggggatgggccttcccccttataagcacactctctta

SEQ ID NO: 2151 - DNA, 105 bp, Homo sapiens
  misc_feature (1)...(105): n = A,T,C or G
caggcaagtaagcgggctntgctggatgcttctcagaagagnctctacaaaggtgtgatggtagagacctataggaatctcacagcatataggtaatattggatt

SEQ ID NO: 2152 - DNA, 106 bp, Homo sapiens
  misc_feature (1)...(106): n = A,T,C or G
ctgcaaaatctcagcggacatcgacaaccttcaatgtcaagccagataaatgtgccancctaaaggagacagngagacagatanggcaaataaaagaacagggaaa

SEQ ID NO: 2153 - DNA, 140 bp, Homo sapiens
  misc_feature (1)...(140): n = A,T,C or G
agagagcgctgattaaccccttcgccccctcgaggatgcccatgaagctcacctccaacagaaggcgcanggatgcacacttttcctgtaggcccatctggagaggccatncagatccatcatcagaccctgctgacacc

SEQ ID NO: 2154 - DNA, 132 bp, Homo sapiens
  misc_feature (1)...(132): n = A,T,C or G
cttcctgctccgagagatgccttctgcctgcgggctgggtcctgtcacacctggcagagctacaagaagctgggcagtgaagggagcagnctncgctcatcctttgactagaccatttttgccagcccacct

SEQ ID NO: 2155 - DNA, 149 bp, Homo sapiens
  misc_feature (1)...(149): n = A,T,C or G
cgcagcttcagcagggctgggtcatttttgacttcatggacacactntctgatcttaanatgaaagaatacnagcgctccacctcttagtgaactggtggacttacattacantnagcanaggctgtctgacagagcaaacttaccctg

SEQ ID NO: 2156 - DNA, 124 bp, Homo sapiens
  misc_feature (1)...(124): n = A,T,C or G
tcgagggcgtgccaaggcaacaatgagggnagcaggagctgcaaagttggnagnggcgcgtggnagnattcttactgaccttctatgnatttctcaagtatttgaaattgaaatggatagcaag

SEQ ID NO: 2157 - DNA, 127 bp, Homo sapiens
  misc_feature (1)...(127): n = A,T,C or G
ctttggtcttactggaccctgggaganggacaacaacangaatgagngtgtgtatggtaaatacaccacagggtctgtnaactttaaaggacnnggccttggacttctcactggaggattgggaatg

SEQ ID NO: 2158 - DNA, 126 bp, Homo sapiens
  misc_feature (1)...(126): n = A,T,C or G
cattttacaatgacagaaganacccataatgcagagacttgagcanggagactgtgagcatgttgttgtcatcacanacataaggcttgngcaccatgacgacctgcttggatagaacactgtatc

SEQ ID NO: 2159 - DNA, 134 bp, Homo sapiens
  misc_feature (1)...(134): n = A,T,C or G
tgagcagtacttgcctcacacagganacccgacgggacgtggcgaaagcagcgganggtcaaagaaggatacgtgccccaagaggnggtcccagtctatgaaancaagtntgngaagtttttcaagagtaaacc

SEQ ID NO: 2160 - DNA, 148 bp, Homo sapiens
aaatacgtggacaccaatttgcagaaacagcgagaacttcaaaaggccaatcaggaacaatatgcagagggcaagatgagaggggctgctccggggaagaagacatccggcctgcaacagaaaaatgtcgaagtgaaaacaaaaaaga

SEQ ID NO: 2161 - DNA, 143 bp, Homo sapiens
  misc_feature (1)...(143): n = A,T,C or G
aaagcagcacggacaccccaggactcagcctcaagggtcttctgtggccgcttcctcagcatggtgaacactgatgangtnaatgccataatcctgnnccagaagaatatgccnggaccggttagagaaaaccaacgagatgc

SEQ ID NO: 2162 - DNA, 125 bp, Homo sapiens
  misc_feature (1)...(125): n = A,T,C or G
gggtttttcaagcgttaaaggaagaaactgtttattgnaaggaactttccttgaagnataagcaaagcttccaggaagctcgggatgagctagnngagttgaangaaggaagcagagagttagaa

SEQ ID NO: 2163 - DNA, 133 bp, Homo sapiens
  misc_feature (1)...(133): n = A,T,C or G
gcagtcatgccgctcgggaaggncnggagccaccagaagagggnacctagtttcnatagacaaatatgggantgctatgntnagcaggaggagccatcttctgngttnctacatggacatatacagccacaca

SEQ ID NO: 2164 - DNA, 132 bp, Homo sapiens
  misc_feature (1)...(132): n = A,T,C or G
agtactggatttataaatgggtttacatctccgaccttcaaacctgcaacgtctcctctgacatcactcagacagtatcctcctagaagcaggaaaaatncctttggctatcggaagaaaagagaagagaag

SEQ ID NO: 2165 - DNA, 115 bp, Homo sapiens
  misc_feature (1)...(115): n = A,T,C or G
tccatcagccacaatgagagcgtggngcaggncctgcttggtgntggagnttganccaaaccttgnggatgagtttagaantgtctacaagactgccaatgaacagggagtacat

SEQ ID NO: 2166 - DNA, 110 bp, Homo sapiens
aagctctggaaaccatcggtgcaaacctacagaagcagtatgagaactggcagccaagggctcggtacaagcagagcctcgaccctactgtggatgaagtcaaagccgtg

SEQ ID NO: 2167 - DNA, 146 bp, Homo sapiens
  misc_feature (1)...(146): n = A,T,C or G
catggaggcaggggaagagagactctcgagatnttgccaagcnganngaactagacggngatccngaaaggaaagaancnctggatgacctctacatcttcangcagaagagagggganccanatgcnggaacgtgagggcacgtg

SEQ ID NO: 2168 - DNA, 107 bp, Homo sapiens
  misc_feature (1)...(107): n = A,T,C or G
gataggagaggggacgnnttctgaagttatgaagatgcngagtctgagagatgggaattactatgcgtgcaaacaaatgaagcagcactttgaaaggattgagccag

SEQ ID NO: 2169 - DNA, 138 bp, Homo sapiens
tgaggctacgcccccagcgtcccgtggctatgaccaccgctccgcgggattcagtagtgtggaagctggcgggacttttgcgggagtcgggcgatgcggttctctctggctgtagcacactgagcctgctgacagaca

SEQ ID NO: 2170 - DNA, 122 bp, Homo sapiens
  misc_feature (1)...(122): n = A,T,C or G
gaccaaaggataggaagncaggccagcgacagcagtgnnagactgggcaaccatccagntgatgaagatgcgagnattcttgggatcngggagcattcctgaaaaataagagattaaaaaaa

SEQ ID NO: 2171 - DNA, 129 bp, Homo sapiens
  misc_feature (1)...(129): n = A,T,C or G
gcggcgggcgcaggaactcggntagaagggggccagctggggggcgaggagtggaccagacacgggagctttgacaataagcccacaccnaggctggctgcatnccaacgacaaagtcatgggacctgg

SEQ ID NO: 2172 - DNA, 136 bp, Homo sapiens
  misc_feature (1)...(136): n = A,T,C or G
atacaaaggaatggttcctnctggcacaattacatccctacgttngcctgttntgttatttacttactcattgnatggctgggaccaaaatacatgaanaacctggcagnacgttctcttgccgaggcatcctgca

SEQ ID NO: 2173 - DNA, 130 bp, Homo sapiens
  misc_feature (1)...(130): n = A,T,C or G
tgggagaaggacaacaacnagaatgagngtcgtgtctggtaaatacaccacagggtctggtnacttttcaaggacgtggccttgganttctcactggaggaatgggaatgtntcagttttgctcatcagg

SEQ ID NO: 2174 - DNA, 137 bp, Homo sapiens
gaaaattgtgcaatgaatggtgacactcgggccgcagtggtgacctcaccacctccaaccacagcccctcacaaggagaggtgttttgtcagagtcgatgagaacaacccacaatatttgctgggagaggaacatgg

SEQ ID NO: 2175 - DNA, 144 bp, Homo sapiens
  misc_feature (1)...(144): n = A,T,C or G
agcgccattcttggggaccctggacgctatcatggaaacggagagtgagcagaactctagttcgaccaatgggagttccagttcaggggccntgctctcggccccagatagcacagatgtccctgtatgaacggcaaaaaaaaa

SEQ ID NO: 2176 - DNA, 118 bp, Homo sapiens
  misc_feature (1)...(118): n = A,T,C or G
tcagttgagacattggngcagaancttcatgacttcttagcacactcatcagaagaatctgaggaaacgtgttcttctccacgacttgtcatgaaccaaagcacagataaaaaaaaga

SEQ ID NO: 2177 - DNA, 130 bp, Homo sapiens
  misc_feature (1)...(130): n = A,T,C or G
accgtgaagatatacttgnngccactttgcaggccgggcacggngnagaggttcngcttgatgntgggcacgatcatacaggtgtccnnccgagttacacagacctgcgnagccgaggagacaggtgccg

SEQ ID NO: 2178 - DNA, 102 bp, Homo sapiens
gttgaagcatggagctgcgtgtgggaaataagtatcgcctgggccgaaagatcggcagtggctcctttggagacatctacctgggtgccaacattgcctctg

SEQ ID NO: 2179 - DNA, 119 bp, Homo sapiens
  misc_feature (1)...(119): n = A,T,C or G
aagcttcctatccagaagctacgccagngttgngtcctntttgactttgtntctgacccactgagtgacctgaagnggaaggaagtaaagngcgctgcgctgagcgagatggtggagta

SEQ ID NO: 2180 - DNA, 137 bp, Homo sapiens
ctacttggatcccccgaagtccctatggctctatatgatgaagatctcctgaaaaaccctttctacctggcccttcagaagtggcagccccgacttgtgcagcaaggtggcccagatccatggcattgtaagtctac

SEQ ID NO: 2181 - DNA, 103 bp, Homo sapiens
  misc_feature (1)...(103): n = A,T,C or G
ggaatgaaaaaggggncctctacaacatctcgtccatnaccgacctnggaggntttgacccagtgtggcttttncttgtcggtgggaggagtgatgttcattc

SEQ ID NO: 2182 - DNA, 125 bp, Homo sapiens
caatgagatcatcctggtcttgcagcacatttgacaactgtgtggacaaaacagtgcaagcagttcatggaaggtagtgccagtgaagtgctcaaagaatggatagtaactggcaaaaaaaaaaa

SEQ ID NO: 2183 - DNA, 120 bp, Homo sapiens
  misc_feature (1)...(120): n = A,T,C or G
cggtttctagttttagggtttatganttacaagngntantggnctttgctggacggaataaaagtgggctgcaagcatgacctcctgatgagggcagtngnatttattgaagagtggttg

SEQ ID NO: 2184 - DNA, 101 bp, Homo sapiens
  misc_feature (1)...(101): n = A,T,C or G
tgcacccccaggggagtttaatgaagtattcaatgatgnccggctnctgcattancagtgacanctctcctcagggaaggggcagcacatgcatttgccca

SEQ ID NO: 2185 - DNA, 144 bp, Homo sapiens
agtaatttgaagcaagttacatttgtggatatctctgcgaacaagttctccagcgttcctatctgtgtcctgcggatgtgtcgcctgcagtggctggatatcagcagcaacaatctgagtgacctgccacaagatatagacagg

SEQ ID NO: 2186 - DNA, 136 bp, Homo sapiens
  misc_feature (1)...(136): n = A,T,C or G
tgactgagcccagccatcccttccctcctcagncaggagntnctggagatagtcgncncagctaccancggcagatgtcagagcccatntgtccccgcaggtccgccacccntttngggattcaagcaggaatacc

SEQ ID NO: 2187 - DNA, 147 bp, Homo sapiens
  misc_feature (1)...(147): n = A,T,C or G
agtgccatctacgaantcctttttaaggagggcgnganggtnnncaaaaaggatgtgcacatgctctaagcanccggagctggcagacaaaaatgtgcncaacnttcatgcaatgaaggccatgccnntntctaaagccccggaggc

SEQ ID NO: 2188 - DNA, 135 bp, Homo sapiens
  misc_feature (1)...(135): n = A,T,C or G
ttccaccagaatagaaggagtttgtatcaaacttagtaaaacgatttgaggaacagcataaaaatgacgnggaaaagacttccttcanccttttaccccagncgtncagngntatgntggaagaggaccataaag

SEQ ID NO: 2189 - DNA, 133 bp, Homo sapiens
  misc_feature (1)...(133): n = A,T,C or G
tgaggaaactactacantcaaggttgagtantcgaaagtaaagnagcttctgcaaagctgtgctgtgttggggattccaccttcccgtgtnatgattatngacaagaggnaatttgncctttaataatgtaga

SEQ ID NO: 2190 - DNA, 142 bp, Homo sapiens
  misc_feature (1)...(142): n = A,T,C or G
gtgatggtgggagaaagaggancagatgangtggcanagacttttagggccaaagangtcatcatnacaccagccactgagttaaaagagaagaaaggacccgnattngcaggtcttcggagctangtttactgaccacatg

SEQ ID NO: 2191 - DNA, 121 bp, Homo sapiens
  misc_feature (1)...(121): n = A,T,C or G
aaggatgtggccggggacttntnactggaggaatgggaatgtntnagttttgntcagaggtnattgtacatggatgtgatgntggagaatttaaanaatctgtngtttgtggaaaatcatt

SEQ ID NO: 2192 - DNA, 120 bp, Homo sapiens
  misc_feature (1)...(120): n = A,T,C or G
cagctcgaggccaaatgggtaggggcccggnaccaaccctccggagccaggtgtccggagaaaccagaaaactctctcacaagacagaataaatctaagnctgacatgtaaaaaaaaaaa

SEQ ID NO: 2193 - DNA, 118 bp, Homo sapiens
  misc_feature (1)...(118): n = A,T,C or G
tgacccactgagtgacctgaagtggaaggaagnaaagcgcgctgagctgagngagatggtggagtatatcacccacanccggaacgtgatcaccggngcccatttaccccggaggccg

SEQ ID NO: 2194 - DNA, 143 bp, Homo sapiens
  misc_feature (1)...(143): n = A,T,C or G
ctcgcacagctactcaaanntctgacctctctaaaaggaagnctaanacagaagactntcttacccttctntgcgttntgaggntctcctgcgctgcccancagtaagcgtatattttggaagatctcaggatgaggaggatg

SEQ ID NO: 2195 - DNA, 135 bp, Homo sapiens
  misc_feature (1)...(135): n = A,T,C or G
aggctattctagtgtgtaacatgcggntatngncatctttctggagntntttgcttggggactactgacagcacccacatatggnggtattgcatgaaaccttccctaaacatacanttctgatgaatgggctat

SEQ ID NO: 2196 - DNA, 135 bp, Homo sapiens
  misc_feature (1)...(135): n = A,T,C or G
gctgtgctgtgcaccancnattctgantntccaggagtatcagngggcnaagatgnctaangagccacgcccntncttatccaggagggcctacagccccactacnggaggaaaaaagnggagccccacttaccc

SEQ ID NO: 2197 - DNA, 134 bp, Homo sapiens
  misc_feature (1)...(134): n = A,T,C or G
attcatttgccctgagncccagattgtggaggataacgggacagcncgctttgaatgccacaccaagggcgngtccagnccccatcattacttgtnnaaaaggaccaggangaccgtgcctgaagagttccggt

SEQ ID NO: 2198 - DNA, 136 bp, Homo sapiens
  misc_feature (1)...(136): n = A,T,C or G
cctgtccgcttctatcatgactggantgacanagagatgcgnagtgntgaataaacacttattnntgacttcaaaaccaactggtctaccttggtgaatctttctgaaaaagacgtatataagaaagaaaaacaaa

SEQ ID NO: 2199 - DNA, 147 bp, Homo sapiens
  misc_feature (1)...(147): n = A,T,C or G
ctatacttcagacacgaagagccgnagntatctcctgagaatggggcccgcttgccgnccctacagtntgtgttgtgttgccgncacctctccagnggtgaagctacnctgaagagaccttaacatacctcaatcaaggtgtgggcc

SEQ ID NO: 2200 - DNA, 112 bp, Homo sapiens
  misc_feature (1)...(112): n = A,T,C or G
tgtttgagcgcagccaacccttccctcctcagtcaggagttcctggagatagtcgccccagctaccaccggcagatgtcagagcccatngncctcgtcactctgctcactgg

SEQ ID NO: 2201 - DNA, 114 bp, Homo sapiens
  misc_feature (1)...(114): n = A,T,C or G
gttttgaggtgccggtatggctcactanaatataaagtgaagaagagaccgcaagtgtatttttagtgtctacaccttgcccttcccaagatgaataaaccgctaacagatcaa

SEQ ID NO: 2202 - DNA, 120 bp, Homo sapiens
  misc_feature (1)...(120): n = A,T,C or G
tcattgctgaacaatccagctgccagtgccaagcacctcatgaaaaantgaccgttggccangnccgnttaggaacaccagttgataggcctgttngagtgtatgcagatggaatatttg

SEQ ID NO: 2203 - DNA, 138 bp, Homo sapiens
  misc_feature (1)...(138): n = A,T,C or G
aggcagtatggcttatcttctttgngctgggcctggggacactgctcccctggaatttttttatgaccgcaaccaagnatttnacaaaccgcctggacgtgtcccagaatgngtcctcgtcactctgctcactgggga

SEQ ID NO: 2204 - DNA, 142 bp, Homo sapiens
  misc_feature (1)...(142): n = A,T,C or G
cactgttatggtagcgactgtggatattcatctagcatggaaggaagtgaaacaggttctcgagaaggttcagatgtttgcctgcaccgaggnaatttgtaaccatgatgacnatggtgaancattcctgtgctcaccactg

SEQ ID NO: 2205 - DNA, 144 bp, Homo sapiens
  misc_feature (1)...(144): n = A,T,C or G
tcacagcaaaggcaggangacaaagaagaggatctaangaaaaagganctgaagnctttanatattnacagtttnataaaaaaagacgacactctgaccttggntccctatgatgcctgctggaatgcttttcgaggagacaaa

SEQ ID NO: 2206 - DNA, 109 bp, Homo sapiens
  misc_feature (1)...(109): n = A,T,C or G
taagtccttagaggactgatttgncttttgaatcagagagntgcaaagtncgataaagaatggccctnggggataagcacaaagtcaagcggcagagattggacaggat

SEQ ID NO: 2207 - DNA, 146 bp, Homo sapiens
  misc_feature (1)...(146): n = A,T,C or G
tcttgcaaaagagtcttncgggaattgaagatgttgcgtttttttaaacatgataatgtactctctgcccttgacatacntncaacctncacacattgactattttgaagaaatgtatngctaaccagggaatgtgaaagaagggg

SEQ ID NO: 2208 - DNA, 117 bp, Homo sapiens
  misc_feature (1)...(117): n = A,T,C or G
acggatagaggagcttaccacgactgctagtggcaangtggaagcaaangtngtntgnttttacagaagacgggacatctccaacacgcttatcatgctcgccgacaagcatgctat

SEQ ID NO: 2209 - DNA, 120 bp, Homo sapiens
  misc_feature (1)...(120): n = A,T,C or G
tgcctgcagtagaccaaatcacctgtatctcaaagggnttggcggngtgacggtgaaagagattgccccgacggctctgatgaagcccctgagatctgnccacagagtaaagaaaaaaaa

SEQ ID NO: 2210 - DNA, 143 bp, Homo sapiens
  misc_feature (1)...(143): n = A,T,C or G
tctgtgagctggcagtgcttggaagctacacagnttgtgccatggactctgaggtcagcaacggntncggnctgggggncaagcacatcacagacctgcgtggngnncggctttctccaaagctctggctgtactcgccaaga

SEQ ID NO: 2211 - DNA, 129 bp, Homo sapiens
  misc_feature (1)...(129): n = A,T,C or G
tgagttgctcattgatggccgggtggtcaaggtgatggacttcctgaaaactcgtctgttagatacactctctgaccagattaggaaaattcagaaagtncngaacngtcttgcactgtgcagatagac

SEQ ID NO: 2212 - DNA, 128 bp, Homo sapiens
  misc_feature (1)...(128): n = A,T,C or G
atttggggtactgggcggtggnttcgagagctgtagtctcatcgntgaaggactgagcactgccctgctgtatgttcgatgactttaagaagatgcggtgnacagatnggccagacccaccgaggctg

SEQ ID NO: 2213 - DNA, 147 bp, Homo sapiens
tgccccttgcgttcctccgtccagccatgaactggtgcccatcaccacagagaccgtacccaagaatgtagtagatgtgggggaaggagactgccgggttggaagttctccgaaaaacctggaggagggcgtgagtatgaaaaaaaa

SEQ ID NO: 2214 - DNA, 132 bp, Homo sapiens
gactgaggctcccgttggctctgttttaccggcattaccttttctacaaggccctgcctgctccactttttctatcttggaactataccagataaaatcacttctgtttgttcagtttttcaaaaaaaaaaa

SEQ ID NO: 2215 - DNA, 148 bp, Homo sapiens
  misc_feature (1)...(148): n = A,T,C or G
acaatgcaaatgtacttnctgcaagaaaagctgctgctcctgctgncccgcgggctgtgcngaagtgctcccaggncgtgtatctgcaaagaggcttccgacaagtgcagctgntgtgcctgaaggggggcaggaggggcccccacat

SEQ ID NO: 2216 - DNA, 105 bp, Homo sapiens
  misc_feature (1)...(105): n = A,T,C or G
aactgaggagtatcccggcaagaagaagcaaaggctgctgtaggtgtgactggaaatgacatcnctnccccgccaaacaaggagccctcaccatgaaaaaaaaaa

SEQ ID NO: 2217 - DNA, 110 bp, Homo sapiens
  misc_feature (1)...(110): n = A,T,C or G
acctgcaaccacagcccctcacaaggagaggtattttgacagagtcgatgagaacancccanaatatttgcgggagaggaacatggcaccagaccttcgtcaggacttca

SEQ ID NO: 2218 - DNA, 114 bp, Homo sapiens
  misc_feature (1)...(114): n = A,T,C or G
gaccattgtgggaaccctanangtggtattggnctccagtgcccgagtcgcaccgcaccgaatcctttatcaaactncagactctctagtctattggaccattgcctgtggtgg

SEQ ID NO: 2219 - DNA, 117 bp, Homo sapiens
tgacccacacatttgtcaatgggtcttctgtctccagccccatccagctgcaccatggggacaggatactgtggggaaacaaccatttcttcagactcaatctgccaaaaaaaaaaa

SEQ ID NO: 2220 - DNA, 131 bp, Homo sapiens
  misc_feature (1)...(131): n = A,T,C or G
gactgagctttattcatggactacacagncttacagcttaccaattgaaaactgtgtatatatgtcagtttttgacaagagttgcatctggaaaggcccttggcgtngagaaagtttgctaaaaaaaaaaa

SEQ ID NO: 2221 - DNA, 115 bp, Homo sapiens
  misc_feature (1)...(115): n = A,T,C or G
ctttaccagtcctacggtaagctctgccagcggntgccacttcancgagccgggccatggccgaatattcctatgtaaagtccaccanactcgngctcaagggcactaaagccaa

SEQ ID NO: 2222 - DNA, 137 bp, Homo sapiens
  misc_feature (1)...(137): n = A,T,C or G
ccaccctggcggacctgctacagnttcgctgtcggcttcgcgatgatgtgcagagcatcaacttggctgcgggatggggtgcagctggtggagagcaaccgtacccgcatcncnagggnaggaggtggaggtgcgga

SEQ ID NO: 2223 - DNA, 130 bp, Homo sapiens
tctgagattccgaacatgaacaacatcatctcgttccctttggacagtttgctgaaaggagatctgaaaggagtaaaaggggatctgaaaaagccctttgataaagcttggaaggactatgaaacaaaaa

SEQ ID NO: 2224 - DNA, 143 bp, Homo sapiens
  misc_feature (1)...(143): n = A,T,C or G
agaaagtacttgatgtatncancagttttgcacgtnccttttgatgaaaatgacananatgattntgtntggtttttagaccatgattattncgagcaaaaaactatcgttcatggcgcgtatgtttcaaagaacgtgattca

SEQ ID NO: 2225 - DNA, 144 bp, Homo sapiens
  misc_feature (1)...(144): n = A,T,C or G
gcatttgatgcttgcattaagctgtctgganngcctgangtctccctctctttcatgaacccanngntactanatgacgtaagntaccacccatgcatccgantcagacgctgggagtctgaaagagttttgccattcattcct

SEQ ID NO: 2226 - DNA, 107 bp, Homo sapiens
  misc_feature (1)...(107): n = A,T,C or G
gaataacgtgaccagaagctgcctataaggcagcaactcaatgggaaagatggnttnatccccaagaattacntananatgaaaccacatccgtggttttttgggga

SEQ ID NO: 2227 - DNA, 134 bp, Homo sapiens
  misc_feature (1)...(134): n = A,T,C or G
tgcgctactcggggatgctggantacggngaggattcgganngcagggtatgcctgtcagaagaccctttcaggactttnacaaaaggtataaagttgcgtgatgaggaacnttggccctgcctgacgacatcc

SEQ ID NO: 2228 - DNA, 121 bp, Homo sapiens
  misc_feature (1)...(121): n = A,T,C or G
gaaccgtaagtccttcnatnattgtanccagtacgtgaacaagaagttcagtaaccagtacaaagccncaataggagcggactttctgaccanggaggtgatggttggacgacagacgggg

SEQ ID NO: 2229 - DNA, 142 bp, Homo sapiens
  misc_feature (1)...(142): n = A,T,C or G
agttttacaaggacacactaccaaaagttacggagcnaggatganccccagcgnnaaacactnaaagccanccatatggcggtngactgctgtggcatancctngtcctttggagcagtttatctcggacacctgcgcccaa

SEQ ID NO: 2230 - DNA, 127 bp, Homo sapiens
  misc_feature (1)...(127): n = A,T,C or G
cacagcttataacagttcgangagaaactgnatntcacanctttaactggtgtnccagaagagcacatcagaaccagaanggtcagaatctttgttcctgctctgcantancatgcagcctggagct

SEQ ID NO: 2231 - DNA, 123 bp, Homo sapiens
  misc_feature (1)...(123): n = A,T,C or G
ggccacacttgtcaacatggtacagactctctaagtntgtgaattaactttcaaccatcgnactctacatggacagtgctcagtgaatggaaagacactccttgattttggtgataaaaaaaa

SEQ ID NO: 2232 - DNA, 131 bp, Homo sapiens
tagagttaatgccaaagacagcaaatggttgacacctttacacagagcagttgcatctgtgtagtgaggaagcagtgtctcttggctcacaaagtctgacaataaaagatattaatatgcaaaaaaaaaaa

SEQ ID NO: 2233 - DNA, 110 bp, Homo sapiens
  misc_feature (1)...(110): n = A,T,C or G
cagagacccagagactccccagtcctcaggttctaagcgcagcagacnaaaagcaaacagtcnaggtttctagggaggtcccctctntaccatcctgcaggatgacaact

SEQ ID NO: 2234 - DNA, 114 bp, Homo sapiens
actgaggtttaatgatatccatgtaccaatacgcctggaatgtgtgaaatttgccagccactgcctcatgaaccatcctgatttagcaaaggatttaacaggatttctttgtgt

SEQ ID NO: 2235 - DNA, 121 bp, Homo sapiens
  misc_feature (1)...(121): n = A,T,C or G
gagtgagatttgaaggatgcnccggccggcccgggttcggtgccacccactcctcccgattcatccccctcaagtagccgaggccaataaagactggttttggtccctggaaaaaaaaaaa

SEQ ID NO: 2236 - DNA, 147 bp, Homo sapiens
caagctggtttcaaagcacagtagcccaagtaatttacaccagaaacacaaagggtggggacgctccagctgctggctgaagatgcatgaacaggttcaatcagctgtacatttggaaaaataaaactttattgaatcaaaaaaaaa

SEQ ID NO: 2237 - DNA, 107 bp, Homo sapiens
cttctatgcttgccaggttgcccagaggaaaattcaggaaattctgactcaggtaaagcagcaccagcagcagaaagctctgcagagtggaccacctcagtcaaggc

SEQ ID NO: 2238 - DNA, 115 bp, Homo sapiens
  misc_feature (1)...(115): n = A,T,C or G
ggctgagagcaccaggtattttaggagacgnntgaaggaaatgtngttcatcatggtatggganngaagactccccggtnntggctttgatgctctacatgccggccaaaattgg

SEQ ID NO: 2239 - DNA, 148 bp, Homo sapiens
  misc_feature (1)...(148): n = A,T,C or G
gcaaagccgtgcaagnagtgtntggaangtcacaagatctttcagcagnacccgctgaacagtatcttnaggagaagctgccagatgaagtanttccnaaaaanatnnttcttatttgnntggancangacctttgtagagctgcttg

SEQ ID NO: 2240 - DNA, 131 bp, Homo sapiens
actgagacttgtcaggtatgccagatgctgctgcccaaccagtgcagcttctgtgcacaccagcgggtccatgcacacaagtccccctactgctgcccggagtgcggtgtcctcgtcactctgctcactgg

SEQ ID NO: 2241 - DNA, 144 bp, Homo sapiens
  misc_feature (1)...(144): n = A,T,C or G
gtggctttaaccaagnatgccgatccagctgagcttaaagcaatatttttgaagnatgcgagcattgnaaaanntggagngnttngtatgtctcctcatgactnatgtcantnggtcatnnaggntatttttggagaaagccag

SEQ ID NO: 2242 - DNA, 119 bp, Homo sapiens
cgttatttgtataccgaaggtcagcttcgccttaccatggctttaccattgtcaaccgactgaacatgcacaatctggttgagccagtgaataaagatttggaatttcaaaaaaaaaaa

SEQ ID NO: 2243 - DNA, 149 bp, Homo sapiens
  misc_feature (1)...(149): n = A,T,C or G
cactctgtcagcaagntgagcaggaaaatcgaggcaagatgtcaggccggagcgggaagaagaaaatgtccaagctgtcccggtcagccagggccggcgtcatctttccagnangcacggttgatgcgctacttgaaaaagggaacctt

SEQ ID NO: 2244 - DNA, 126 bp, Homo sapiens
tgaggctggtggatgacccgttgtgtggtggacctgcagctggggacctggacaacccccccaagaagttccgagattgcctcttcaaagtgtgccccatgaaccgctactctgtaaaaaaaaaaa

SEQ ID NO: 2245 - DNA, 120 bp, Homo sapiens
  misc_feature (1)...(120): n = A,T,C or G
ctacagcgccattgaagacggtncagccgctgtcctggnagaacgccccgaaggnctgnttacagntcacgatccccggagggaccngtcctgctgcaggctgccaacagctacctgcga

SEQ ID NO: 2246 - DNA, 130 bp, Homo sapiens
gagcaagcgggacattgagctgctgctaaaactgatcgccaacctcaacatgctattgcgggatgaaaatgtgaacgtggttaagaaggccatcctcaccatgacccagctctacaaggtggccctacag

SEQ ID NO: 2247 - DNA, 108 bp, Homo sapiens
caattttggaaacacatgctactgtaacatccgtgcttcaagcagcatgtacttctgccggccgttccgggagaatgtgttggcatacaaggcccagcaaaaaaaaaa

SEQ ID NO: 2248 - DNA, 148 bp, Homo sapiens
  misc_feature (1)...(148): n = A,T,C or G
gactgaggctcgtggncccangaacacctgagcgtgnagctgctccaaaacattggatgctggataagntgactggngtgtttgctcctcagtccatccactggncctcacaagctgaggganngcctgnctctcatcattttcctaa

SEQ ID NO: 2249 - DNA, 106 bp, Homo sapiens
tggccaatattctgtggtcgtggaggccggagtgtctgaaatgacacggagagccatgggaggagcattgccttttaaagacgcgctcactcagcgcctggcactg

SEQ ID NO: 2250 - DNA, 142 bp, Homo sapiens
gactgaggttgttggaaaggacaccaatgtcatgttggtagctttggcagcaaaatgtcttactggcttagctgttgggctcagaaagaaatttggacaatatgcaggacatgttgtgccaacaattttggaaaaaaaaaaa

SEQ ID NO: 2251 - DNA, 117 bp, Homo sapiens
  misc_feature (1)...(117): n = A,T,C or G
acacttctgagcgaactcacaagtgncagatgtgggttgggagnanaagcggccncccgnccntggaacctctncctagctacctgccnaggtgggacttaatgcagggagctccaa

SEQ ID NO: 2252 - DNA, 321 bp, Homo sapiens
  misc_feature (1)...(321): n = A,T,C or G
gatcaatagcagcgcagtgctactccagtggcatgaaaaggccttagctgtaggaggactaggctccattataagagttcttacagcaagaaagactgtttaaaaaaaaatcctgttaccttgagaagaattttggatgcccaggctggtgaanaagggactgacaatggaccatcttcctagaactcccaactaaatacttcaggacacatcttctggaatgnattttacttttgaggnggagggagaaattgccttattgattcctaaattctttgcaggatcagaatgtctgcctttgtctacagagttaacacaaaa

SEQ ID NO: 2253 - DNA, 145 bp, Homo sapiens
gactgagattgacaattgccttttttgcactctctgggctggatatgctggactccttggatgtggtgaacaaagacgatataatagagtggatctactccctgcaggttcttcccacagaagacagtgaggtacgactcttagc

SEQ ID NO: 2254 - DNA, 213 bp, Homo sapiens
  misc_feature (1)...(213): n = A,T,C or G
aaagctggaacctggcgctnatgacttgctgcnnanntctcnatngncagataggaaccagcnttnttgnngcatcgatcacactngancctgctgtagcttctccatctcaatgagtgccttccagcgcatggcatacttcatactcaaaggagccaggttgtgcaaatctgggtggctgttctctctccctatagacaatacacattatgt

SEQ ID NO: 2255 - DNA, 532 bp, Homo sapiens
  misc_feature (1)...(532): n = A,T,C or G
gactgagacctggctgaagtgccgtgntcgngcacatcataggggccaccggtttctcgnaaagcannctctttngcaagnggggcatccacacaggggccgcatggaagctcntctcangtgtacganaaggccanacacagntngacncaccctcagtataggggacatggctttactggtnccaccccattgacnctgcacttatgcctactaanggnntccaangcnggccctcnactgcatctccaggtgtgggcccaggacagctttggccgctgccagcttgctggctatggnttttgccatgngcctagcagcccangcactcatcagctggactgccctacatggaggcccctgggcagttggagggagcagctagcacggnctttcgtgggtggtgggccacagntgctgcacgcagataccatctacagcggggctgaccgctaccgcctgcacacggccgcgggtggcacagtgcaccttggtatcggcctgctgctgcgccacttcgatcgctatggag

SEQ ID NO: 2256 - DNA, 147 bp, Homo sapiens
atgtggaaaaggcgattgagtttgttttgtcctgcatgaactttgatggtggatttgggtgcagaccaggctctgaatctcacgctgggcagatctattgttgcacaggattcctggccataactagtcagttgcaccaagtgctat

SEQ ID NO: 2257 - DNA, 296 bp, Homo sapiens
  misc_feature (1)...(296): n = A,T,C or G
gactgagactctcttctcagcatccaagctcgcttggtcagaacccttggatgagcctgtgggacccttcctcctagccctgtggtttggagccggaggctttgggactgtgagaggatggacaaagattctcaggggctgctagactcgtccctgatggcggtcaggcacagccagccgctccgaggatgaggagtcactggcagggcagaagcgagcatcctcccaggncgnnctctntaccntgaatgtcttantanctncnnggttgatgaactgntttcataccctgagaa

SEQ ID NO: 2258 - DNA, 335 bp, Homo sapiens
  misc_feature (1)...(335): n = A,T,C or G
tgaggtttgaggagccccggcgcctggatggacttgtgtgctatgcctgttcgttcgggagacgggactaagttaacttggcacgatggggattcaagggttacttcagttcatccaagaagcttctgaacctgtcaacgtgaagaagtacaaaggacaggcagtggctgtggatacctactgttggcttcacaaaggggctattgcttgtgctgaaaagctagccaaaggggaacctacagataggtatgtaggattttgtatgaagtttgntantatgctgctgtcttatggggtcaagccgattctcatatttgacggatgtactctacctt

SEQ ID NO: 2259 - DNA, 162 bp, Homo sapiens
gactgagataatggcagacccttggcaggagtgcatggactatgcagtaatcctcgcgaggcaagctggagagatgattcgtgaagctttaaaaaatgagatggatgtcatgattaaaagttctccagccgacttggtaacagttactgaccaaaaaaaaaa

SEQ ID NO: 2260 - DNA, 379 bp, Homo sapiens
  misc_feature (1)...(379): n = A,T,C or G
gtgaaagaccaagaaacccattcctctacaagaccagactgtcagagatgagaaaggaaggtacaagcgcttccacggagcctttagtggtggtttctctgctggttacttcaataccgtcggctcaaaggaaggancggccaccctctaccttngccacntgactanacnagacactgacgnaccnntcnngtcttgnncctgnngatntnatgnncaacaagnatctnaggccancctggaaagctanactctgccncctcacactcccnaatgctgntatnacagncattgactctccatgtccaaatncccgcctgactttnaaaaatanngtcccctgtgcacatgtccacgctgcttgaaaaaaaaatttaac

SEQ ID NO: 2261 - DNA, 490 bp, Homo sapiens
  misc_feature (1)...(490): n = A,T,C or G
actgagtgggcagaaatggctctggaaaagcaacttcttttatgcaatccagtttgttctcagtgatgaattcagccatcttcgtccagagcagcgattggctttgttgcatgagggtacaggtcctcgtgttatttctgcttttgtggaaatcatttttgacaattcggacaaccggttaccaattgataaagaggaagtttcacttcgaagagttattggtgccaaaaaggatcagtatttcctagataagaagatggtcacgaaaaatgatgtgatgaatctccttgaaagtgctgggttttccagaagtaatccttattacattgttaaacaaggaaagatcaaccaaatggcaacggcaccagattctcagagattaaagctgttgagagaagtagctggtactagagtgtatgatgaacggaaagaagaaagcatctccctgatgaaagaaacagagggcaaacggnaaaagatcaatgagttg

SEQ ID NO: 2262 - DNA, 532 bp, Homo sapiens
  misc_feature (1)...(532): n = A,T,C or G
actgaggtgacatgggcagatgtnaagaaactgtgtctccaggcctgttaagaccnctgttcccttcgntccgaaacgcgtnttggngactgagcanattccatctcngaacctangatctgctagcagtggccaggcccagcgggtcctgtgtncttctaactcccagctgtgtcccttcacaagcccagaaacttggagcaggtcataagccggcaccaaagcagttgccagctgccagtgttcctcgacctgtgtcccggctcaataacccccagangaatgagcagcctgcagcctccggaaatgattctgaaaaggagcaggcatccttgcagaagaccgaagacacaaaaaagtnggcttgctgtctctgctacgagagcacccgtcgggctgtgcgacacttgtcttcatgccatccccactaaactcaaacttagcaggggctcaaaagtagntctttttatttccttaattactttttcatagaagattttnttaaaactttattttaaaaagtagtaaaaac

SEQ ID NO: 2263 - DNA, 155 bp, Homo sapiens
  misc_feature (1)...(155): n = A,T,C or G
agctttgaggatctggtggtgcacttcacccaggatgagtgggatttgctggctccttcccagaanactctctatggagatgtgatgctggagaccttcaggaacttcactgatacaggatgtgaatgggaagaccanaaaattgaagaccattt

SEQ ID NO: 2264 - DNA, 301 bp, Homo sapiens
atagtatgggatgtagcagcaggtgcagcatctggtgcaaaatcaatgtggacagaacataaatcacctgatggaaggacttattattacaatactgaaacaaaacagtctacctgggaaaagccagatgatcttaaaacacctgctgagcaactattgtctaaatgcccatggaaagagtacaaatctgattccgggaagccttattactataattctcaaacaaaggagtcccgctgggcccaaacctaaggaacttgaagatcttgaaggataccagaaatacccattgtttgctgga

SEQ ID NO: 2265 - DNA, 242 bp, Homo sapiens
  misc_feature (1)...(242): n = A,T,C or G
gactgaggctgtcaccgatttgggctggtcgcgncctacgttgatccaggaaaaggccattcctctggcgctggaggggaaggacctcctggcccgcgcccgcacaggctccgggaagaccgcagcttatgctattccgatgcttcagtcgcttctccacaagaaggcgacaggtcctgtaatggagcaggactttgaggaancagctttggacaccncatctgcttggtactactgggctg

SEQ ID NO: 2266 - DNA, 146 bp, Homo sapiens
  misc_feature (1)...(146): n = A,T,C or G
ggccccagctgtagtacattcanaggactacagggttatcaaggagatgctgatgaaaaggttactaanaaggaaagagtgcctccttgtacctgccagactcttgctcacaatacagaaaaggcatatgagtgtaaaaaaaaaaa

SEQ ID NO: 2267 - DNA, 517 bp, Homo sapiens
  misc_feature (1)...(517): n = A,T,C or G
gactgagtgtagataaatccgatctggataggctcggagtaacctgaccagtgaggtcgtcgcttgctgtcggaagcttcgaagccagtcgacctggttgtcagacgtcctatatgaccgtgaccctttggtcacggagttcattaaccagggcatcgaggatgtgaattcggaggcgcccacaatgggtgccaagatcattaagtgggtcattctagacaacgatttctctgnggatggtggggagcttggacccatgagcaagatgaacaggtccattgcggtcaagatataccaagaggaaatccagaaactctatgagacttcgacctcctaggaaccccattcaccctaatcttcgttcaagcgccggcacttcatccccttcatcctgtttatcgggggacaatttctacagtggaggggggactccctgagagggtcctgggtggaaaggtatatcccgctctctagagttggtatttgaattgtaaagaaattaaatgtgttccctaaa

SEQ ID NO: 2268 - DNA, 380 bp, Homo sapiens
  misc_feature (1)...(380): n = A,T,C or G
gactgagttctagggttgcccttaattgctgtagtaacctgggtccggggcctcggtggtgctcctgatgtccctcacccacccctgaagatcccaggtgggcgagggaacagtcagcgggatcacagtctttcagctagcatcctgtactccgacgagcggctgaatgtgacagaggagccgacgtctaacgacaagaccagggtcctgagcatccagtccacgctcacggaggccaagcaggtcacctggagggcggtgtggagtggtggtgncctctacatcgagctcccagctggacctctgcctgagggcagtaaggacagttttgcagctctcctanagttcgcanaggagcaactccaggctgaccacgtttt

SEQ ID NO: 2269 - DNA, 524 bp, Homo sapiens
  misc_feature (1)...(524): n = A,T,C or G
actgagagatcctgaggagctggtcgactactatgagaagttcaaacgggtagacagacggcacccanaagcgccgggtactgcactgcatccanaggtgccctgatccgcanccaggagctaggcgatgagaagatccagatcgtgagtcatgatggtggagctggtgganaaccgnagcagacaggtggacagtcacgtgnagctcttngaagcacaccaggacntcagtgacggnactggtggcagcggcaaggcggggccaggacaagtcgaagagtgaggccatcacacaggcagataagccgaataacaagcggtccaggaggcagcgaaacaatgagaatcgagagaacgcgtcgaataatcacgaccatgatgacatcacctcaggaacgcccaaggagaagaaagcaaaaacctcaaagaagaagaaacgctccaaggccaaagcagagagggaagcatctcctgccgaccttcccatcgaccccaacgagcccacgtactgtctgtgcaaccag

SEQ ID NO: 2270 - DNA, 117 bp, Homo sapiens
  misc_feature (1)...(117): n = A,T,C or G
tgtttgtggaccactgcgtggccacgccttcacctttgccagacccgnactcctccccctatcanttcatngnggncttccacggntgccttggggatggtctatctgagagctttt

SEQ ID NO: 2271 - DNA, 236 bp, Homo sapiens
cgcctgatgaaggccactggtcctgatgcggcagccgggacgggtgcaggaaattgtgggcgcccttcgcaggggcggaggagaccgcctgcaggtgatttccgattttgacatgaccctgagcagatttgcttacaatggacagcgatgcccttcttcccacagtaagtcacatttcagctttccttgtagggctcaagatgacaactgctatggagcaaataaagggagtcttg

SEQ ID NO: 2272 - DNA, 519 bp, Homo sapiens
gactgaggggtgcttcgatctttggtggaggcttccagctcaggtgtgtctgtgctgagcttgtgtgagaaaggtgatgccatgattatggaagagacagggaagatcttcaagaaggaaaaggagatgaagaaaggtattgcctttcctaccagcatttccgtaaataactgtgtgtgtcacttctcccctttgaagagtgaccaggactatatactcaaggaaggtgacttggtaaaaattgaccttggggttcatgtggatggcttcattgccaatgtggctcacacttttgtaattggtgtagctcaggggacccaggtaacagggcggaaagcagatgtcattaaggccgctcacctatgtgctgaagctgccttacgactggtcaaacctggaaaccagaacacacaagtgactgaagcatggaacaaggttgctcactcatttaactgcacaccaatagaaggtatgctgtcacaccaattgaagcagcatgtgattgatggagagcccttt

SEQ ID NO: 2273 - DNA, 509 bp, Homo sapiens
  misc_feature (1)...(509): n = A,T,C or G
actgagaaaccagctgattcccaccgagttacgccgggaggctctagccttacaggggtccttggagttcgatgatgctggtggagaaggtgtaaccagccatgtagatgatgaatatcgntggnccggggttgaggatcctaaggtcatgatcactacctccagagaccctagttctcgcctgaaaatgtttgcaaaggaactgaagctggtgttcccaggtgcccagcgcatgaaccgaggtcggcatgaggttggagcactagngagagcttgcnaagccaacggngtcaccgacctgttggtggtccatgagcatcgaggcacacccgtggggctcattgtcagccatctgcccttcggtcctactgcctatttcacactgtgtaacgtggncatgcggcacgacatccctgacctgggcaccatgtcagaagccaagccccacctcatcactcatggcttttcctcacggctgggcaagcgggtgtcggacatccttcgttacc

SEQ ID NO: 2274 - DNA, 519 bp, Homo sapiens
  misc_feature (1)...(519): n = A,T,C or G
actgagctttgaaaactttgggctcctgatgattatggcatcaagaaacatctggtgtgtgagaagaaactttctctttgatttaagagactggatgcttcaatattcagcagaagttttcctcaagtcgatttcattcaggccgtttagtgcggaatgcgacagtaaggacaaggagtctttggaggaggagagggaggacctgctgagcaacttagtcaccatgggcgttgatatcgacatggcaaggaggcgacagcctggagtttttaacaaggctgttacgaatgagcaggagctgaagttattccttctgtccaagggagctagtgacaaagtgattggtagcatcatatcaagatatccacgagctataacacgcactcctgaaagtctttcaaaacggtgggatctgtggagaaagattatggcatcagaccttgaaattgtaaatattttggagcgntctcctgaatccttttttcgatctaataacaatctaaacttaaaagaataata

SEQ ID NO: 2275 - DNA, 515 bp, Homo sapiens
gactgaggtaatttctccagaaagaaacaaaattgatgccttgcatcctggaagttcatttaggaatctgaaattagggacttctttaaaatttggacgtggctaatcgaggagcaacaagacccaacgggccaaatactggaaataaaatatgccagttcaaactggtccttctaggagagtctgctgttggcaaatcaagcctggttcttcgctttgtgaaaggccaatttcatgaatttcaagagagtaccattggggctgcctttctaacccaaactgtgtgtcttgatgacacaacagtaaaatttgaaatatgggatacagctggtcaagaacggtatcatagcttagcaccaatgtactaccgaggagcacaagcagccatagttgtgtatgatatcacaaatgaggaatcctttgcgagagcaaaaaactgggttaaagaacttcaaaggcaagcaagtcctaatattgggatagctttggcaggaaacaaagctgacttagcaaat

SEQ ID NO: 2276 - DNA, 160 bp, Homo sapiens
  misc_feature (1)...(160): n = A,T,C or G
gactgagaccaagagaaccctgtacagtaagaagtacggngtggacctcatcagatacacccatgcagccaacacagtcgtttacagctctaacaaaatagacgatactattcgttacttgtccttgcatgacaataaatacatcagatactttcctgga

SEQ ID NO: 2277 - DNA, 356 bp, Homo sapiens
  misc_feature (1)...(356): n = A,T,C or G
cagccgctggaccgggccactggggaacatgccantgngcactgagnaccccggggaactgggccagcccccaggcctttaccccagcaaccacccacctggncgggcaggnaccctgcgggctgctatcccgccaagacacctttgatgctngacacccncggcagccgaaattctgcctacncggagccggnagactcgtgtgtggacatggagacagacccctcagagggcccagggcctggagaccctgcagggggaggcacaccaccagcccggcagggctcctgggaagacgaggaagactatgaggaggagatgaccgacaacaggaaccggggccggaataaggcccg

SEQ ID NO: 2278 - DNA, 413 bp, Homo sapiens
  misc_feature (1)...(413): n = A,T,C or G
actgagcttttgaggaacttgaaaaagccttgagtacagcccaaatcctgaagatgctcagagangaatgaagatggagatggatgancagntgaaggctgttgagagagcgagcgaggaggagcgcctccgccttcagcatgagctgagtcgggtgaggcaggaggctgccagcatggcaaagaactcntaagaacaanttgctgcncgtccnnaagctgcttgcngaggagctcgncancaaanagcagnagctgntcagnaggcttgnggcccnccaaaggnngctgcnggagcagatganaatagntctngnaaagagncgatcanaatatttnaagctcncccccnaaaaanagcagcaggaatccttgtttttntaagagtnanagctgctgaaaaaggccatcctt

SEQ ID NO: 2279 - DNA, 516 bp, Homo sapiens
  misc_feature (1)...(516): n = A,T,C or G
ctttttattctggcccacntacaaactgaaggatntacaacnncggagactgnannatgtaacgagncnnngcantgagaggtaganggtgncccccagtntatagtggnnccagctgnactnggtacagtaggnccgcttgcatggcttgtttgnnggncacnattcnngaggcaatacaaacaagttctacatgctggattcgaggtntgcagacagagggttacagtgggaaaggatcgactgccaaggaatccctccatcatcaaaggacaaacttggcgtctgggtgtataaaaacaagttaatattttttggaggctatggatatttacctgaagataaagtattgggaacttttgaatttgatgaaacatntttttggaattcaagtcatccaanaggatggaatgatcatgtccatattttanacactgaaacatttgcctggagccagcccatcaccactggtaaggcaccttcacctcgggctgcccatgcctgtgcaactgttgg

SEQ ID NO: 2280 - DNA, 531 bp, Homo sapiens
  misc_feature (1)...(531): n = A,T,C or G
gactgagtgaccccatggnagacgggggagaagcnagccagtgcagtggctgggaagacaccagtatgctgagtccagagcccaaggaccagacactgaaaatgattaagattttaagtggtgaaatggctattgaattacacctgcagttcctaatactgaaataataacacagacctcatgattctgaaaaacacaaaggatgcagtacggaaattctgtgtgtcatacagcaactgtaatagcaaactcattcatgcactgtggtactaccagtgaccagtttcttagagataacttggaatggttggccagagccaccaactgggccaaatttactgcaacggccagcttgggtgtaatccataagggccatgagaaggaagcactacagttaatggcaacataccttnctanggacanttntncaggatnagcctatnaggaagggggcggtctctatgcattgggtctcattcatgccaatcatgggggggacataattgnctatctccttaatcagctcaagaa

SEQ ID NO: 2281 - DNA, 553 bp, Homo sapiens
  misc_feature (1)...(553): n = A,T,C or G
actgagggagaagaaaagaaggagatagaggagctgctggctgagaagttagtgctgctgggaggccgnggtcccattngaaancnccanggtcccctnaaaccatgtncanaagttacctcgaccggtctggccccttnacacaccccagatttctgaaccangcacatgaaccactccacttattgttaaatacatccccaagttctagctcnttgcngcatngcgccttagnannnnancttctaaaaaancctggcattntctgtttttatacancatacatgttatagacatggacactntagatgtttccanttnaantanacannttttattnaggcctannnatgnngnacnacccaagnctnaagnngctgcaaaatacctaattnncanantncctanctgcaacgnggtaccacatttcaacaagatacaagattttancgacactttctaccgacaatttcatatcattgnatgtggcctggactctatcatagcgagaanatggatcaatggaatgctgatatctcttctaaattatgaa

SEQ ID NO: 2282 - DNA, 484 bp, Homo sapiens
  misc_feature (1)...(484): n = A,T,C or G
gactgagattctggccaatcaggaagtccaagcccagtgatcctgccaagaatcctccagggtacctcgaggacagctttgtaaaatccggagtcttcaatgtatcagagcttgtgagagtatccagaacacccataaccctgggatctgtagacagnttcccanangnattaaatatccttgccaannntactntttngacatgaactctggngtgaacctgcagaggtcgctgtcttctccaccgagcagcaaaagacccaaaactatatctatagatgaaaatatggagccaagtcctacaggagacttttacccctctccaaattcaccagctgctggaagtcgaacatggcatgaacgagatcaagatatgtcttntccnnctacaatgaanaancctganaanccactgttnagctctacatctccncaggattcttccccnagattgancactttcccccagcaccatcatcccgga

SEQ ID NO: 2283 - DNA, 523 bp, Homo sapiens
  misc_feature (1)...(523): n = A,T,C or G
aactgaggaactttatggaagaccttgggttatggagcagcagaaaagagctctttaganggcttcagaaatgggaattaancacatactngtntgctccaaaagangactacaaacataggangttttggctgagagatgtattcagtggaagaagctgagcaacttatgactctgatctctgctgcacgagaatatgaaatagaattcatctatgctatttcgccaggactagatatnnctttttctaaccccaaggaagtatcaacgttgaaacgcaaatnggaccaggtctctnagttngggtgcaggncgtttgctttgcttttcgatgatattgaccataatatgtgtgcagcanacaaagaggngtncagttnttttgcacatgcacaagttnncatcaccaatgaaattnatcagtacctgggagagccagaaaccttcctcttctgccctacagaatactgtggcactntctgttatccaaatgnatctcagnctccttacttgaggactgtgg

SEQ ID NO: 2284 - DNA, 312 bp, Homo sapiens
  misc_feature (1)...(312): n = A,T,C or G
gcaccacctatataaagctacatcntgactttcnctcnttgcccacactttcanataactgagatttnnatccccaccnnacngcttattattgcncaaaatgccctgncagaatctatntgnacctcattattgctgatgtactgngcncatccatnatggctgatgcaatgcggcggctgcatacgcttgatccggctacctgcccattcgaccaccaagcgaaacatcgcatngagcgagcacgtactcggatggaagccggtcttgtcgatcangatgatctggacgaagagcatcaggggctcgcgc

SEQ ID NO: 2285 - DNA, 551 bp, Homo sapiens
actgaggccgttgacttcgagcttatctgaaatcaaaaggagctgagctctcagaagaaaactcggaaggtggacttcatgtagatttagctcagattattgaagcctgtgatgtgtgtctgaaggaagatgataaagatgttgaaagtgtgatgaacagtgtggtgtccctcctgttgatcctggaaccagacaagcaagaagcattgattgaaagtctgtgtgaaaagctggtcaagtttcgggaaggcgaacgcccatctctgagactacagttgctcagcaaccttttccatgggatggacaagaatactcctgtgaggtacacagtgtactgcagcctcatcaaagtggcggcatcatgtggggccatccagtacatcccaacggagctggatcaagtgagaaagtggatctctgactggaagctcaccactgaaaagaagcacaccctcctcaaactgctctacgaggcgctcgtggattgtaagaaaagtgatgctgcatcaaaggtcatggtggaattgctcgggagttacacagaggacaat

SEQ ID NO: 2286 - DNA, 309 bp, Homo sapiens
actgaggttgtctcctaagtgtcagagtgtggagggctccccatgcggccaagtattttgatgatcagactttctgggagttcccacacttggcggttggattttaaccgaaatcatctgagagcgaagccgggtgagaagagagatgccctttctttgtgtcccttttgtctgcatcctgtgttacaagaaaggcttccgagtggtcatcttagtttaaatagtatgtttggtttcatgacagagactattaatactttgggatgaatacacctcattaaagttctggtccaattctaaaaaaaaaaa

SEQ ID NO: 2287 - DNA, 542 bp, Homo sapiens
  misc_feature (1)...(542): n = A,T,C or G
gactgagatacatgaagcagacaacatttgaagcccaagcctttttagaagctgtgcagttcttccggcaggagaagggtcactacggctcatgggaaatgaccaccggggatgaagtccaggtcctgagtaagctggtgatggaggagctcctgccgaccctccanactgacctgctgcctaaactgaaggggaagaanantgacanaaagagggcctgntttggactcnatgntaggaagcctacaatctggttcagcaccaagtttcaaaaggattaanatgccttgaaggaggagtgcagagctctgacaaaggacctggaagggaccatccgctcagacatggatcagattgtgacctcaaagaactttntaactgggaagatccgagcaatggtggctcagccagccgagcagtgctgtggggagagcgtgcagcccttcctggcgtccattctggaggagctaatggggccagtgagctctggcttcagtgaagtccgtgcacttttcgaaaaagaagtagatgaactcagtcag

SEQ ID NO: 2288 - DNA, 421 bp, Homo sapiens
actgagagggagaaaagagtgagagggcagcaaagctgaggaagaggagcgagttccagccgaggagcagccacctgtgagaaatgaattttctagacgaaaacgttctaagtcagaagacatggacagtgtagagtccaaacgccggctgatatatggatgaagaatactgaggctgagtttcaagtaaagatcacagccaaaggtgacatcaaccagaagcttcaaaaggtcatacagtggttgctacaagaaaaactgtgtgccctacagtgtgctgtgtttgataagacgttggcagaattaaaaacacgagtggagaagatagagtgcaacaagaggcataaagcagtgctcaccgagctgcaggccaagatagccaggttaaccaaacgttttggagcagccaaagatgatctta

SEQ ID NO: 2289 - DNA, 118 bp, Homo sapiens
  misc_feature (1)...(118): n = A,T,C or G
gcctccttatcaggaattcanggatnatcttgtgaaaacccacaccagagtctctgttcagaggacccaggntccanctgtggctaccacatagcgggtttttatatgataaaaataa

SEQ ID NO: 2290 - DNA, 528 bp, Homo sapiens
  misc_feature (1)...(528): n = A,T,C or G
tgaggacagcattgggcagctggaaagtgacctgaggaacacaaaaagcgagatggcacgccaccttcgggaataccaggacttgctcaatgtcaaaatggcccttgacattgagatcgcagcttacaggaagctcctggaaggtgaagagacgcggtttagcaccggcgggttaagcatctcggggctgaatccactgcccaatcccagttatttgctccctcccagaatccttagctctacagcctccaaagtctcctntgccgggctgtccctgaaaaaggaggaanaanaggaggaggaagaggcctntaaggaagtcagtaagaaaacatccaaggtaggggaaggtttcgaagagacactgggggaagcggtaatatctacgaanaaaactggaaagtcggntacagaanaaagtaccagttcaagccaaaaaatgtaatgccgctgcttgagaaaaagtcgatgcctgggagggaatgcacttggctcattcacggcacactcctgaaccacacccaccac

SEQ ID NO: 2291 - DNA, 355 bp, Homo sapiens
  misc_feature (1)...(355): n = A,T,C or G
aactgagatgagagtccctacactaaatctgccagccagnacaaagccgcccgatggagcattggctgtgaggagacagagcatcccaggttagaccagactgttggatatttcagctgttttacttatttttgaatcctgttattttggnggtcctaaatgattccagcctggttaccccgtgttattcatagagcaccggactaaactctatgcaactgatacagccaataatcaaaaactaggtcaggcaaccttgccgacctacgaggattcatcttgcaacctgccgccgctgtggancccttngnannangatnttaatagatatccactgtcggttacttgtcttgcg

SEQ ID NO: 2292 - DNA, 469 bp, Homo sapiens
  misc_feature (1)...(469): n = A,T,C or G
aagtcctgttccatgtccatgcgtntgccacccctgtggacctctggagtgtcggttgcatctttgcagaaatgtttcgcagaaagcctctttttcgtggaagttcagacgtggatcaactaggaaaaatcttggacatcattggactcccaggagaggaagactggcctagggacgtggcccttccccggcaggcttttcattccaaatctgctcaacccatcgagaagtttgtgacagatattgacgaactaggcaaagacctacttctgaaatgcctgacgtttaatccagctaaaaggatatccgcctacggcgccctgaatcacccgtncttccaagatctggagaganacaaggacaacctgaactctcacctgccatccaaccagagcacctngnagctgaacacagcctgaggttncacggggatncccatganctcgncatctgaacacatgggcggctg

SEQ ID NO: 2293 - DNA, 298 bp, Homo sapiens
  misc_feature (1)...(298): n = A,T,C or G
acacacctttaaggagagcctttgaaatgtttgctactnannatncgccatntgtnctatcgnngatcatgangagntcctgcagtgcctgnactcctggagcatctctgcggaaaggaagagggaattcctccatggatagcacagcagggtgcagtggaaccccacctatatgccgacaagcccagaccaagctagaagnggccttatacatgtttctgtggaatcctgacactgaagctgttctggttgctatgncctgtttccgccacctctgngaagaagcagatattcgatg

SEQ ID NO: 2294 - DNA, 349 bp, Homo sapiens
  misc_feature (1)...(349): n = A,T,C or G
gggcagagctcagatnnctantatggttgatcgtagatagngtgctggattccccangtgtttcccaagaacccacctagagcatgangagattntttaggagcnggtgtccngatggctccnaggagacgttcagctactctgantttctcagantgatgcatgggcaagagatntgccatcttgagaatgattctgangtatgaggagaaaaacanagancacangaggccaactggtcccccagccaagaaagctatctccgagctgccctgattggaggtggatgtcacacggnggggctgagtgaggagcttntgatgacagcancatggaaaaaagaaacagt

SEQ ID NO: 2295 - DNA, 521 bp, Homo sapiens
  misc_feature (1)...(521): n = A,T,C or G
gactgagccctcagggattctcactgaaagtgacatctgcnccaccccaagctgtgtgatagcagctgccagaatcctcgaaaacatggaccaatcgaggaacccctgtgaaaacttctaccagtacgcttgcggaggctggctnangcacnangtgatncnaaanacnagactgcatcatacaggggntntnacatccttcgngacgagcatgaaggttatcntcacaggtngtgcatggaggattccacgntccnatnntngcncggcccgaggacagggccngnncantatnntcntncntgcatgaaccaaagatgtcgttcaanaagagagactctgancccctnnngancgnataaaaaatggtangaggttgncctgtgnccntggataagtggaacganaccatgggcctcaagtgggaactggagcgacagttggctgtgttgaactctacagnnggnaggcgggtcctcatcgacctcttcatctgnagtgacnaccagaactccagccgg

SEQ ID NO: 2296 - DNA, 441 bp, Homo sapiens
  misc_feature (1)...(441): n = A,T,C or G
gactgagacggatgagcgataaaccagcnttgtcagaagttgaaacgtttgacaaatcaaagttgaagaaaactaatactgaagtaaaaaatactcttccgtcgaangaaacnatnnngngcgagaaannacacttngaangancttganactgattacatctcctttcgagagcaacatcatatatngcctgacagnnatgcntttnngctngaggntatnaccctatgcganatananccatgtgaggcagcntcctgggaganccatttantaccctggctgcnaaggtcgccattngctatgngncattaggntttntttgggactgctcatgcaaatatatanacatgtnaggcagctcctggtagatccatttactaccctggctgcaaaggtcagcatttgctatgaatcattaaatttttttggtactgctca

SEQ ID NO: 2297 - DNA, 387 bp, Homo sapiens
  misc_feature (1)...(387): n = A,T,C or G
gactgaggtattaaangtnatntgaagaggttatggagcancatccnagatganngcattntgattccaggctgccatnnacacccaggtctactgngctctgccacctcctttacanctgagaaacaactttctagttttctgctccatgaagaaagagangagtacctctgtcatcacgcctataatnatcccgagagtagtcatccctggagctccacgaccgatcatcccgtctgtcatagcggtcttcatagcggtccccacctcctctgtagtcatcatctctccggtacccacttccaaatgcccttctgccactgcctatcctggagtcatagcctaataacagatctcaaattgtggtcacacagaaagggggggggg

SEQ ID NO: 2298 - DNA, 370 bp, Homo sapiens
aactgaggaagatgcaacatggcagcagcaatggaaacagaaacagctgggtgtcgagtatatttgaaactgcagagtgtgaggagggaaatggtgaatcacaggaccgacccaaactggagcctttttatgtcgaacggtattcttggagtcagctgaaaaagctgcttgctgataccagaaaataccacggctacatgatggcataaggcgccacatgactttatgtttgtaaagaggacggatccagatgggcctcactcagacagggtctattaccttgccatgtctggtgagaacagagaaaatacactattttattctgaaatccctaaaaccatcaacagagcagcagtcttaaaaaaaaaaa

SEQ ID NO: 2299 - DNA, 264 bp, Homo sapiens
  misc_feature (1)...(264): n = A,T,C or G
ttacctagctcgttgnanacaaaggcatcagtctgcacaccgttcacantaacttgtacggtttcacagcanaccagtacgtgnaacgttatgagctcgagccaccagggccaactgtgctgtccctacccgagacatcacagatccattggccaggagtgcatgagctcccaatagcaccttagaaacctgtttgttttanacagtgtggacatggagaaaaaaaaagtcatgttattcagtatataataaagttccccactt

SEQ ID NO: 2300 - DNA, 527 bp, Homo sapiens
  misc_feature (1)...(527): n = A,T,C or G
atgactcttcttgctcttcatctaagttgaagaaacactgtgcactttaatctctcgtctgtgatattgggccaactgaagacagggttttgaaatctcagctataaagatatctagccaaaatctcaatcttgccttaacaatgtttcagagactgaataaaatgtttgtaggcagaagtcactacttcttccagccaagaaccagaattcagtgagaaagaagatgatgaatggattcttgttgacttcatagataccngccctgcctnttnaanggaggaannggancntanggaaaaccttgtcnnngagcnntcnaccnagcncncttatgctntncccngttcncntnctnctttgaaangcnngantgacaccaatgattnctgnttccttcatnttnnnncctgnccantgnaggagagctggntcatcactcctcccccatgtttnacagcangttgnatnaaccactancattggtggaaacaacgcccctatggaaaaccttttcccttgacatcc

SEQ ID NO: 2301 - DNA, 111 bp, Homo sapiens
  misc_feature (1)...(111): n = A,T,C or G
gctgcgcttcattaagaaatcttaccatattgacgccgacagggnggtctacagcactaaagagaanagcctgactctgaaggaacttttcgntaagttgaatatgcatcc

SEQ ID NO: 2302 - DNA, 363 bp, Homo sapiens
  misc_feature (1)...(363): n = A,T,C or G
atgaccccattacactgaatgttgnggggaancngtacncaacctanctgncaaccctgacnagnttccccgactccatgctgggggccatgtncagtggaaagatgcccaccaagagggacngccagggtaactgcttcattgaccgngatggcaaagggttccgntatatcctcaacttcctgcggacctctnacctgnatntgccagaggacttccaggagangggtctgctgcgcagggaagccgacttctaccaggtncagcccctgatcgaggccctgcaggaaaaagaggtagaactntccaaggcgganaanaatgccntgcttaacatcaccctgaagcagcgcgtgcagacgg

SEQ ID NO: 2303 - DNA, 279 bp, Homo sapiens
  misc_feature (1)...(279): n = A,T,C or G
gcgtctgggatgcccngacacatattagttaaatgacaaanagtcatttgnccacgggagtgacagtgaaaaaccggcatgatccggcctccaccctgatgggacagtgctgtatgggctcaggatcactaccacagcagctgngcatganggncctcagaagatacccactggatgagnaaaactgnnctttgnaaattgaaagctgggagtattngagttngccttcctattttgtccttcgaattgtaaggtgttgtttggttgtttatttgtcat

SEQ ID NO: 2304 - DNA, 320 bp, Homo sapiens
  misc_feature (1)...(320): n = A,T,C or G
gactgagaggaattgagccttccaaggaagaggcagnttttgtcggacaagtaaccgcangagcttgattgtaacctccagcacatcacctacgctaccaaggccacactcccnactnnatggcnacacagngaanctgttggttganattcagagnggnanagttggntgtgangnatattgtggntgaatgtaganttataccttagccngctgttcagaagnancactgtttggctccatagagntnaaacttgacatccgntgaaatntctaagtcctatttgccttgcttttangacttgaatctcttgagtaaa

SEQ ID NO: 2305 - DNA, 257 bp, Homo sapiens
  misc_feature (1)...(257): n = A,T,C or G
gactgagtgctgggggaaggactggccaagggagagcgtgccttccgggcagtgctgtgctgcatgcagctgaaagggaagctccagcttgtgtcctccatccttgccaagtcactgtcaggggagtctctgaatgggatggtaacgaaagatttgacaagacataaagacnctttctcacagaaacagagacagccaacagagtaatgtcctgtctggatgnccnccgtagaanacttaaatgaagggtcctgcac

SEQ ID NO: 2306 - DNA, 389 bp, Homo sapiens
  misc_feature (1)...(389): n = A,T,C or G
tttcttaaaatgtgagctcttccagaannctggnccttttannattnagaggggnccttaatgccatcagaggcgttanttcctgacacagccagaagagaagcccaaagccgtagttacttcacagcagctggaaaccatggccaagctctcacctatgctgctaaactggaaggaattcctgcttacattgtggttccccaaacagctcccaactgcaagaaactggcaatccaagcctatggagcatcgatagtatactgtgacccaagtgacgagtccagagaaaaggtcactcaaagaattatgcaagaaacagaaggcatnttggtccatcccaaccaggagcctgnngngatagctggacaaggaaacaatgcccttggaag

SEQ ID NO: 2307 - DNA, 547 bp, Homo sapiens
  misc_feature (1)...(547): n = A,T,C or G
actgagatgaggtgcaggatgcngagngaagcaggctccnctgcgggaccgctcccacntggacnnnnccctgatgctnagtgaggacnggcnggctgccgantactcancgnagctgcagngactactagaagatgtancatactgtncatcaagcccctggagcagtcttacaagtacaatgagcttcggcagcatgagatcacagacggggagattacttccaagccaatggtgctgttcctgggaccgtggagtgttggcaaatccaccatgataaactacctccttgggttagaagatactcgataccaactttatacaggtgctgaacctaccacctctgagttcactgtccttatgcatgggcccaagctgaaaaccattgagggcatcgtcatggctgctgatagtgcccgatccttctcaccactggaaaagtttggccagaattttctggagaagctgattggcattgaggttccccacaagcttctagaacgagtcacattcgtggatacaccaggcatcattgagaaccgcaagc

SEQ ID NO: 2308 - DNA, 259 bp, Homo sapiens
  misc_feature (1)...(259): n = A,T,C or G
tctgccagccatactncatgcagtgagcaggancananggaaagcgtgaaagacaangcaggggggctgcntgnngagcctggacngctgnctgcctggaggggaccgtcggccccgcccatctcacccttggaatcctcatcgggaaagtagatgtccagtttctccccttcgccatctccataggggacatccagctggttcctcctggtggcccgggccttctgggnggctgcagaggcaggcgagtcgctgtcag

SEQ ID NO: 2309 - DNA, 217 bp, Homo sapiens
  misc_feature (1)...(217): n = A,T,C or G
gactgaggttaccttattatgttcaacattaagcaacatcagccgaagattctgaggactggtcccggtaaagtaaacctcatactttttgttcagagccactatgccatggaacagagacagncttctttggcatgtataccccgcacaccagccatggtcctgtgggcctaaatccatgcaaaataaagttcatgttcctacttaaaaaaaaaaa

SEQ ID NO: 2310 - DNA, 451 bp, Homo sapiens
  misc_feature (1)...(451): n = A,T,C or G
ctgacgataggcactgttnctacgtgganacagtagtaggattctanggngnanctggntaccnnccccntnnntttaataagcttgtgggacantaacangtnacantttacatcacctgcctcagggctntaatctataatggaaatgaactttcaccaacaaagctctgcagcatatgacagactttgccatccagtttaacaagaatagcttcggtgtcatcccaagcactcccttggccatacatactccactgatgccaaaccanagcattgacgtctctctgccgctcaacaccttgggcccagtcatgaagatggagcccctgaataacctgcaggtggctgttaaaaacaatattgatgtcttctacttcagctgcctcatcccactcaatgtgctttttgtagaagatggcaaaatggagcgccaggtcttccttgcaacg

SEQ ID NO: 2311 - DNA, 438 bp, Homo sapiens
  misc_feature (1)...(438): n = A,T,C or G
tccctgtgctaccacantaagctcatcttagccccganggttcgggtggggactctgccaatgcgcctcctagccctggattatggagcggacattgtttactgtgaggagctgattgacctcaagatgctccagtgcaagcgagttgtaaacgaggtgctcagcacagtggactttgttgctcctgatgaccgggtagtcttccgtacgtgtgaaagagaacagagcagggtggtcttccagatggtaagagacacctcccactccagtgttcagcatcctctctgttccctggaagttcctaattcacactatgtctgccagtattgaatgcctgtacataccatgctgtacaatggtggcatcctatgattgacttgaatgttttctagagatcggttcttgattgggtaccatgttggggactgtggaaattaa

SEQ ID NO: 2312 - DNA, 378 bp, Homo sapiens
  misc_feature (1)...(378): n = A,T,C or G
agactgagcttcttcattcttggctcttcctgagcttggctatcctgtcacataatctactaaataaagtcaatgtttgtttatcccagcagagcancgtcnatgangagnggcgcttntgtctcctgntntncgtgtggccatgtcnnagaagggaattggngcccgacggnncccnnatntgagcctgggaggagtcctgnctnanaagagcagccngcttccctctcctccatcttctcaaaaacatacttgtcaatggggcgccccagcaagtactcatcacggntcaccatgccacccggaccttggtacatccaanccaacttttcttcttttttcctggnttaaaacggaaataaaggagagagaaaagga

SEQ ID NO: 2313 - DNA, 433 bp, Homo sapiens
  misc_feature (1)...(433): n = A,T,C or G
gactgaggaagtttccggtgancgtgngacgttcaattatgcnccggaagngcactgctggcgaacncnaggaagtcncagagcttgcagntgcagctanntcttacctgcagaacgcaagctggccggagggtgtgggtacttttagccagcggccgctgtcatgacnacccaggggggcctagtggccaaccgaggccggcggttcaaatgggccattgagctgagtgggccgggaggaggcagcaggggccnaantgaccgncccagnggacaggtanactccctttatctngtnggttnctngtacaagcaanggcctganaccaacnggcnagatatcgaccgaatcctgatgnaaaanccctggtgggacattgccttnggccncntgaaacaaattcccatgaacctcttcatcatgtacatggca

SEQ ID NO: 2314 - DNA, 554 bp, Homo sapiens
  misc_feature (1)...(554): n = A,T,C or G
gactgaggaccctgtgcccagtgggttttctgcaggggaagttctgatccccttagctgatgaatatgaccctatgttccccaatgactatgagaaagtggtgaagcgccagagagaagagcggcagaggcagctgggagcttggaaagacagaaggaaatagaggaaagagaaaagaggctgtaaagacagacactgaagccagtgggttttcaagacgaccagaccctgattctgatgaggatgaagattatgagcgagagcggaggaaaagaagtatgggaggagctgccatcgccccaccgacgtctcttgtagagaaagacaaagagttaccccgcgattttccttatgaagaggactcaagaccgagatcacagtcttccaaagctgctattcctccccccgtgtatgaggagccggacagaccaagatctccaacaggccccagcaactccttccttgctaacatgggtggcacagtggctcataagattatgnnngaagtatggcttccgggaaggtcagggactggggaaacacgagcaagggaa

SEQ ID NO: 2315 - DNA, 442 bp, Homo sapiens
  misc_feature (1)...(442): n = A,T,C or G
cggtcccacagcctgtccccagcccccngncacagccttgcctacccagcagtatgccaagtctcgtgccctgtgtcgggtgccagtgtgggccttcaaggagaagaggacagaagcccgatcgtcagatgaggagaatggcccgccctcctcgcccgacctagacctgaatagcggccagcatgcgctgcgctggtgctgngggaggctgaggacacccaggtcttcggggatcttccgcggccgcggcgtcaataccagcgacttccanaagctgaagcggaaatattaagcgtacagaaagccttggcctgcgagaggccactgcctctcggcccagcaggagaacaattctttccgggattggctggctcaggttgggcggggccggttctaaacgctccaagggtcaactctgtttcttgcctagcaaacgaccctc

SEQ ID NO: 2316 - DNA, 396 bp, Homo sapiens; identical to SEQ ID NO: 67
  misc_feature (1)...(396): n = A,T,C or G

SEQ ID NO: 2317 - DNA, 346 bp, Homo sapiens
  misc_feature (1)...(346): n = A,T,C or G
ctgcaaaccaggcctggccatgctccancagatncagnccctgncacatangnatagntgatccctctgcagagcctgcatcatcatgcagntgttnttanaggngacacnggcnaaaacnacatgacntcccagcaggaccctagcatctcttcattttcctccgcaccgagttggnccccttcccgaattcatcgatcaggaccagcgagngctctgtggcattgttcactgctttcgccacctgctgggcatgaaggggacaagggagcttccttagcggtcagggctgtgatgtgtcatcatgaataaactccttacatgtgtctacccctaaaaaaaaaaa

SEQ ID NO: 2318 - DNA, 503 bp, Homo sapiens
  misc_feature (1)...(503): n = A,T,C or G
gactgaggcggacctgaactggggccccagtgccgaggnaggcaggggagcagcggaggtggcggtggcttctatggagtgagcagccagtatgagagccgggagctcatgacactcacctgctcctccaaggtctgctcctttggcaagcaagnggtanagaaggtggagacggancgggcccagctggaggacggnctgctttgtgtaccgtctgctgcgctctcccatgtgtgagtacctggttaatttcctgcacaagctccgtcagctgcctgaacgctacatgatgaacagtgtcctggagaacttcaccatcctccaggttgtgacaaacagggacactcaggaactgctgctgtgtactgcctacgtctttgaagtctccaccagtgaacgaggagcccagtaccacatctaccgcctggtcagggactgatggagcccccgccgctggtgtttttcacaacacccccttcctgggaagggcccttttgctctct

SEQ ID NO: 2319 - DNA, 544 bp, Homo sapiens
  misc_feature (1)...(544): n = A,T,C or G
attactgaggaacacacagcatttgctactttccctaatgaaaaagcagcaataaaggcacggccnnnncttnatngttaaagccttcanaganntcctatccaatcttaggacnncaagngacgcngnaagtagataagcangtcctttntatccancancaanaacaagagaaaaaganaaggggcggntgacccntnagnagaannngcnatgannaaaagnagcctgaccnttnancagnaganngtnggnatngcnccaaatcatggncatgaccttttcctctgaattcatgccttaaatatatgtatnctccaccatcaagcacaatcctcgcaaatatagnaaangctctggcangtgtcccanaattctatgtacaggcgcttcatcttatgaataaantgaatttgcccacnccatttggaccgatnacngcacgacctcctatgnatgaggactatatgccattgcatgcaccccttccncctacatcccctcaaccgcctgaggagcctcccttaccagatgaggatgagga

SEQ ID NO: 2320 - DNA, 300 bp, Homo sapiens
  misc_feature (1)...(300): n = A,T,C or G
actgagggttacggtccccgcatcctggtcggccacctagtagccttccccaccagccttcgacggcgagctggatctgcagcgctactccaacggaccaggtgtcagctgggactccaggacccggctcgcctgggatgggagcagtgggttggtctgagactcgtgcaggctgaactggcagtttcccttgtcctgngtgcggaaagngcttcngntncaattcnatcttggctttgcanntgnnagcccacccgggcgcccaagccttccagtgcccacattgcgtaaaaaaaaaaa

SEQ ID NO: 2321 - DNA, 491 bp, Homo sapiens; identical to SEQ ID NO: 68
  misc_feature (1)...(491): n = A,T,C or G

SEQ ID NO: 2322 - DNA, 245 bp, Homo sapiens
gactgagacttttgatgcaaatgatttgtatcaggggcagaactttaacaaggtcctcagctccttggtgacactaaataaagtgacagcagacattggactaggaagtgattctgtgtgtgctcggccttcgtcccatcggataaagtcttttgattccctgggatcccagtcttcacacagtaggacttcaaaattgcttcagagccagtaccgaagcttggacatgactgataacaccaaca

SEQ ID NO: 2323 - DNA, 439 bp, Homo sapiens
  misc_feature (1)...(439): n = A,T,C or G
actgagttcaagggcccattgttggccgatggtgcactgttgcaggcagtctccgctggagccgcttccccagagtttaccaaactctgcgcttggctggtgtctgaattaagagtcctctgtaaactagaagaaaatgtgcaggcaactaacagtccaagctgaagctgaagagttccagctttgaggtgagtgggcttactttggggagatgaactgcccgtatccttctctgacatccggggatgtaaccaagcgccttcttgttgagaagaactgcctccttttgctcacatacctnatctcanaactagaagcctgccanaatgctctgngngaatgctcctncaaaaaaagctcaanaaggaggcgggagtgaggtctttcangagtngaaaggcatatgtattgctctaggaatgtccaaacctccagccag

SEQ ID NO: 2324 - DNA, 543 bp, Homo sapiens
  misc_feature (1)...(543): n = A,T,C or G
actgaggaggcctatggcagctgcccagtcctacctcagcccatcttgaaaacaatcttaggcaacatggaaccaccacgaggccctcctgttagtggggctgagccatctcgggcagttggcactgtcaaagtgtacctgcctaacaagcaacgcacagtggtgactgtccgggaaggcatgagtgtctatgactctttggacaaggccctgaaggtgcggggtctcaaccaggactgctgtgtggtctacaggctcatcaaaggaagaaagacagtcactgcctgggacacagccattgcgcctctggatggtgaggagctcattgtggaggtcctagaagatgtgccactgaccatgcacaattttgtacggaagacattcttcagcctggccttctgtgacttctgccttangtttctgttccatggattccgctgccagacctgtggctacaagttccaccagcattgttcctccaaggtccccaccgtctgcgttgacatgagtaccaaccgccgacagttctaccacagcatccag

SEQ ID NO: 2325 - DNA, 382 bp, Homo sapiens; identical to SEQ ID NO: 69
  misc_feature (1)...(382): n = A,T,C or G

SEQ ID NO: 2326 - DNA, 293 bp, Homo sapiens
gaactgaggcatcagaagaagcctccctcagggcgttggaaagcctgatgacggaatttttccatgactgcacaaccaatgaaaggaagcgggagatagaggagcttcttaataactttgcccagcaagtaggagcttggagattctgcttatattttctgtccagcacaaggaatgactatgtaatgatgtacagcttaacggtttttgagaatctaatcaataaaatgtggcttggggtcccatctcaggataagatggaaatccgtagctgcttgcccaaacttcaataa

SEQ ID NO: 2327 - DNA, 386 bp, Homo sapiens
gactgagcaatttcggcatgaaaacctggtcaatttgattgaagtttttagacaaaagaagaaaattcatttggtatttgagtttattgaccacacggtcttagatgagctgcagcactactgtcacggactagagagtaagctggcatgagaaagtacctcttccagatccttcgcgccattgagtacctgcataataataatattatccatcgagatataaagcctgagaatattttagtctcccagtcaggaattacgaagctgtgtgattttgggtttgcgaggacactagcagctcctggagacgtttacacagactacgtggccacacgctggtacagagctccagagctggtgttgaaagacacctcctacggaaagcc

SEQ ID NO: 2328 - DNA, 273 bp, Homo sapiens
tccttgctgcacgtgcgcagtaactctggctgcacagcggagcccccggataacacggtcgcccccgcaacatggcagacgaagacctcatcttctgcctggaaggtgttgacggtggcaggtgctcccgagctggccacaatgctggactctgacacagacagtgactgatgatgagggcatatttcatctgccccatcactgatgaccacatgtccaatcagaatgtcagctccaaagtccagagctactatagcaacctaaaaaaaaaaa

SEQ ID NO: 2329 - DNA, 364 bp, Homo sapiens
  misc_feature (1)...(364): n = A,T,C or G
ggcattatctcattcatacccggttgaaagccattngaatgtgatgtgtgccataaaaactttagacaactcgttcatntggagaggcatcagttaactcacaatctgcctttcagttgtaatatttgccaacgccactttaaaaatttgaagacatttgtgaagcatcaacagcttcacaatgaatcctaccataatgatgttaaagtcagaagactgcttgagaccaagcaagagaagccggtatatggaatgtgtaatacttttactgcagatgagagatgggcactacacccatgctctaagtctgatgccacatacagcaccacgaagagaaganagaatatccacgcgtgtacgatct

SEQ ID NO: 2330 - DNA, 441 bp, Homo sapiens
  misc_feature (1)...(441): n = A,T,C or G
gactgagataagacttccttttctgttgatgtggagacatagggtacctcccagtttccagtgtttcagaagggacttttgtattgaaactggaagaccaaggtcattccaagcatgttgtgctggggcaatgcatcctatggacaactaggtttgggaggaattgatgaagaaattgtactagagcccaggagaagtgactttttcgtgaacaaaaaggtccgagatgtaggctgtggactcaggcacactgtgtttgtcctggatgatgggactgtgtacacatgtggatgtaatgatctaggacagctaggtcatgaaaagtccagaaagaaaccaggtacgggacatttctntatttctaataatngatcatttatttcactcttgaaatggtgttttgtatgacctctgtaaatcctaaacttacaggctttttca

SEQ ID NO: 2331 - DNA, 423 bp, Homo sapiens
  misc_feature (1)...(423): n = A,T,C or G
cgtatgatcagaggagaactatgnagangacttctnacttatactagcagggcactacggaactctnntcgnnnctggncggccntcnatntagnattggaatctctcgtgacaggaacgtgangatcatctcaaaggcctttcanttttcantgggggggaccgagactggnaacngagnngctntgaacacaccattgatgggatcaggagtatnatggaggctcnctttgttcacttcaataaggaatacgggacctatgagaatgccaaggatcaaaaaaacggcctagctgtgttagccgtcttgtttaagattgacgagtatgacgaaaacacttactacagcgacatcatttctgccttgaagaacatcgagaagccaggagaaactacaactctgaaagacacgaccattaggaa

SEQ ID NO: 2332 - DNA, 338 bp, Homo sapiens
  misc_feature (1)...(338): n = A,T,C or G
accccatggccggttctgaagagttgggtctccgagaggacacactgaaggttctgacggccttccttaagcgcggtgaagtcgctgggtcccctgtcccaactccacccaggagtcctgcccaagaggagacaacagatttcctgagccgcctccgaagatgcctcccttgtcccctggggagaggagcttccccccacggagtcctctaggccccacttccttcccctccgcccctgctatggttccgagcctggcccaacctcttccgagttctatgccctggttgcccagcgnctgnaacaattggngcaggagcaactgaagtccccgcccag

SEQ ID NO: 2333 - DNA, 235 bp, Homo sapiens
  misc_feature (1)...(235): n = A,T,C or G
ctggctgagctgtggntcganttccaagagttcgaggtggtgggacccaccgatctggccagggtgcctttggaaatatgtgtcgtgggggacncntgtttgcnccnnccnaaacctggngtntttggcaccncagagtgantacaacccaaaaacnatatgccatctgttctgccctgnntgnctngtcnttaccagcttgggtgatgtctnaaggtcatcagaatagaggagg

SEQ ID NO: 2334 - DNA, 544 bp, Homo sapiens
  misc_feature (1)...(544): n = A,T,C or G
actgagagaaccatgattcctggtaaccgaatgctgatggtcgttttattatgccaagtcctgctaggaggcgcgagccatgctagtttgatacctgagaccgggaagaaaaaagtctgccgagattcagggccactgctgggaggacgcctgcttcagggcagagccatgagctcctgcgggacttcgaggcgacacttctacagatgtttgggctgcgccgccgtccgcagcctagcaagagcgccgtcattccggattacatgagggatctttaccggctccagtctggggaggaggaggaggaagagcagagccagggaaccgggcttgagtacccggagcgtcccgccagccgagccaacactgtgaggagtttccatcacgaagaacatctggagaacatcccagggaccagtgagagctctgcttttcgtttcctcttcaacctcagcagcatcccagaaaatgaggtgatctcctcggcagagctccggctntttcgggagcaggtggaccagggccctgactgggaacagggcaa

SEQ ID NO: 2335 - DNA, 536 bp, Homo sapiens
  misc_feature (1)...(536): n = A,T,C or G
actgaggctttcctccttcgagtcgtgccaaggttgcaggggcccactgcatggaggaggcctctacagggactatggtgctgctctgggcagggggattccaaaaggtgggtggggagcaggtctccccactcacgggagaagtcaccaggcacctgagaccgaaacattccatacaatctaccggttccgagccatccgagcaattgggttcctctcgcggctgaagttggcccagacagctgngactgtggtggccctgcccccgggcttctattgctactcacaaggcctcatgaccctcagttcactgtgccttctgggnggggncgccagctttgccctggccatgctctgtnggatgagccacttnttccggagactggtgggcatcctgtatgtgaacgagtcgggcaccctgctccgagtggcccacctgaccttctggggctgncggcaggacacgtactgtgccgtgtcanacatgatacccctgtcagaatcccaggaacgggttcaggatgtgtttgtacgcc

SEQ ID NO: 2336 - DNA, 385 bp, Homo sapiens
  misc_feature (1)...(385): n = A,T,C or G
gactgagtgaaggagtcttcaaatgccctgnggaccaacttcctctggactatgccaagatctacccagacccagagctggaggtccaggtgttaggcttggctatccactgcntccacnntgagnagggctgncgctganncntcccacattctgacatntacagggccacttgaacacttgcagccttnaatgtagtcccctgccctaatcgctgcccagccaagctgagccggcntgacctgcctncncatctgnannactgactgccctaagcnccgcctcaagtgtgaatnctgnngntgngacttcaggggggaggcctactatagtcacgagggcgngtgcccccaacagagtgtgtactgtgagaacaagggcggag

SEQ ID NO: 2337 - DNA, 213 bp, Homo sapiens
  misc_feature (1)...(213): n = A,T,C or G
aaggcgaggcagtccaagaaaacgcatccaggtgtgaaggcagccttcttgacttgaggctccaagaaggatcaagtgaagtacacagccccaattcctcaccacagcatactgccaccccacccattgtgaattctgcctctctcagctctgttttgagattaacagcatctagaaacacaacaaatatctanttcgacttaaaaaaaaaaa

SEQ ID NO: 2338 - DNA, 482 bp, Homo sapiens
  misc_feature (1)...(482): n = A,T,C or G
gactgagattgataagtatctgtatgccatgcggctctctgtngannttctgatagatatcctgacacgcttcaagaaagagatgaagaatggcctctcccgggattataacccaacggcctccgtcaagatgctgccaacctttgtccggtccattccggacggctcagaaaagggggatttcattgcactggatctcggcgggtcttcctttcgaatcctgcgggtgcaggtgaaccacgagaagagtcagaacgtcagcatggagtctgaggtctacgacaccccagagaacatcgtgcacggcagtggaagccagctttttgatcacgtcgctgaatgcctcggagacttcatggagaaaaggaagatcaaggacaagaaattacccgtgggattcacgttttccttcccgtgccgacaatccaaaatagacgaggccgtactgatcacgtggacaaagcggttcaaagccagtggcg

SEQ ID NO: 2339 - DNA, 390 bp, Homo sapiens
  misc_feature (1)...(390): n = A,T,C or G
gttggtgcacggctgcatgtcagtgggcanaattccagatgcagagatntacanaatcactgccactgagttgtaccccctgcaggaagaggccaaggaagaggaccagcctgcccgccttanagaaaatcctgagctcaggggtgttctatttcgcatggcccaatgatggcgcctgcttcgatctgnncatcnnntctcaaaaacagggtgatgacggctctgaatgggggacctctttcttntggtaaggggactggggtcacaagagggcagattctgggcaacacctgagctgctgccttgcattcttgctcagggttcctgngntnanctgttggcntgnnnttnnaaanccacncttgcattttgtatagagagggaagacat

SEQ ID NO: 2340 - DNA, 297 bp, Homo sapiens
  misc_feature (1)...(297): n = A,T,C or G
gaagagacactgatcccttctgaagtggaccccaaagtaggccgtcacagactctgtcttttcacgcctcttctggggacacctttgccatctncaaagcagcttgtagtgcgccaggaggagtgccccaccctggttcaccttactgggcctacctgcggatgatacaaacttctccatctccagctcggacccagacacacgatgacctttggaactcaggcttctccctgcttccttccctcgggttctgtggccagttccctctctcggaagcttcttttcaagagaggcagg

SEQ ID NO: 2341 - DNA, 450 bp, Homo sapiens
  misc_feature (1)...(450): n = A,T,C or G
cgcattcacaggacaatnctatgacntcacggagctgtccngannangtggctgatgnccctgagaccatcnacctcttcatgggagactttgtggaccgtggtttctacagtgttgaaaccttcctcctcctgctggctcttaaggttcgctatcctgacagaatcactttgatccggggcaatcatgagagtcgccagattacccaggtctatgggttctatgatgagtgcttacggaaatatggttcagtgactgtatggcgctactgtactgagatctttgactacctcagcctgtctgccatcattgatggcaagatcttctgngtgcatggaggtctttccccttccatccagaccttggaccagatccggacaattgaccgaaagcaagaggtaccccatgatgggacccatgngcgacctcctgnggtctgaccctgaagac

SEQ ID NO: 2342 - DNA, 519 bp, Homo sapiens; identical to SEQ ID NO: 70
  misc_feature (1)...(519): n = A,T,C or G

SEQ ID NO: 2343 - DNA, 494 bp, Homo sapiens
  misc_feature (1)...(494): n = A,T,C or G
gactgagaatcccctttgatgtgagtcatggtagcgcctatgaagggccaagtgtgtgtggtaactggtgcctccaggggtattggccgtggcattgccttacagctttgcaaagcaggtgccacagtttacattaccggccgccatctggatacgcttagagctactgcccaggaggcacagtccctcgggggccgggtgtgtacccgtggtgtgtgattcaagccaggagagtgaagngaaaagcctgttcgagcaagtanatcgggaacagaaagggcggctagatgttctggtcaataatgcctatgctggcgtccaggcaatcctgaacaccaccaacaagtctttcttgggaagtgcctgcctccatttgggatgacataaacaatgttggactcagaggccactacttatgctctgtgtatggggcacggntgatggtgccagctggcaaaggactcatcgngattgtctcctcccctggggggctg

SEQ ID NO: 2344 - DNA, 406 bp, Homo sapiens
  misc_feature (1)...(406): n = A,T,C or G
tttcaccacaaggacttgaagattaacacactgagcnggcagcaggngcgcantgagatcattgaaggtgcantgaagactctgtttgcaatnattgggatcctggcagagcagtttgttccagatggacctcacctgcncctctaccacganaaccaatgggtcaagctgatgaattggcagcacagcaccatgtacctattcttcggtgtctcgggactcatggacatgatcacctacctttacttccacatcgtgcccctggggttagacagagtggttttggctatggccgtattcattgaaggttttctcttctacttccacgttcacaaccgccctcccctggaccagcacatccactccctgctgctgttcggtcttttcggagcagctgtcagcatct

SEQ ID NO: 2345 - DNA, 545 bp, Homo sapiens
  misc_feature (1)...(545): n = A,T,C or G
gactgaggtcgatacaacgtgggntctgcatctgtctgtttgatatcaccaagctggaggacgcctatgtgttcccaggggatggagcatcccacaccaaagtccatttccgctacgtggtgtttcaccccttcctggatgagatcctcattgggaagatcaaaggctgcagcccagagggtgtgcaccgtctctttagggttctttgatgacattctcatcccccctgagtcactgcagcagcctgccaagtttgatgaagcggagcaagtgtgggtgtgggagtacnagaccggaggaaggagcgcatgacctgtacatggacactgggggaggagatcccgcttcagngnggnnggatgaagagctttgnggacacatccccccacaggacccaagttccggccgagggttgnctttttnaaggcgagggagcttgcccaaagaaagggaagcncccatatnccactttggngggatctattcaggggagccaggactaaggcctttntcttcctggggggacgaacaactaagccctggga

SEQ ID NO: 2346 - DNA, 329 bp, Homo sapiens
  misc_feature (1)...(329): n = A,T,C or G
gactgaggtattgtcagaagtggcagcacgttggtacctgagtttgtctgcgatgaagatgactctcctttccagaaggagggaggcaaagacactgaccaagtgtcggacactgatggaggagaacagagactcanagtccacgtgctctagccgggagtccagcggtcggcacagntcaatcacctgccagggaacagaaacttctaagagaattcntttgctaggnctggctgagtggctcatcagnnagggnacacttgctgccacatctgatgacctgaaattgatctattgatcctgcntgggaggagagaacctactcacac

SEQ ID NO: 2347 - DNA, 387 bp, Homo sapiens
  misc_feature (1)...(387): n = A,T,C or G
agactgagggcacccagnacaanttccaggacacgaagggggagacacccaantaggacgatgccacagaatgtcacgatnactgacagcaggctcacggaaatatntggaaagagtgaagaganaggtcatgggtcatgtggggccaagtcatgtgtngccctgactactttctcagtacaacttgagtttgaattctgancaaaaaagtatntnncncaactgataggggttnttngntangnaggcccanctgncnggagccatggnatgcgncctcgtgaaccncatccgctactgacaatanataangccatctgcngtactgcngaccgcagngacaggnggctcatcaccgtcacagacttccagacgcggtcacgcctg

SEQ ID NO: 2348 - DNA, 139 bp, Homo sapiens
  misc_feature (1)...(139): n = A,T,C or G
caagaactgctgcttcttgccncagctcaacagaccctgattatgatgacaaaagactttgaanngatcgcagaggagcagatccaccaggatgattttggagaaggcaagtttnncactgntggatggggcagtaagc

SEQ ID NO: 2349 - DNA, 362 bp, Homo sapiens
  misc_feature (1)...(362): n = A,T,C or G
gactgaggctgccgggggggtacctcacaccaagttagcttctcctacttcaacgcatttaactccttactcaacaacatggagcttgttcgaaaganctatagcactttagcaggcacgaggaaagatattgaagtcaccaaggaggaatttgcccagagctgccatactgctatggacaggtcacttcctctagaaattgatatcttgtaccagcttgcagacctatataatgcctcagggcgctagactctggcagacntngagagaatagctccgctggccgagggggccttaccttacaacctggcagagcttcagaggcnggaatgagcggcnatgggcctgacatgatctgcctt

SEQ ID NO: 2350 - DNA, 429 bp, Homo sapiens
  misc_feature (1)...(429): n = A,T,C or G
gactgaggcagccccaccaaagtccctgacaccgagaangtgacaagaatcgagcgaatcggcgctcactcccacatccgggggctgggactggatgatgccctggagccaagacaggcttcccagggaatggtggggcagctagcttgcccggcgtgcagctggctgtggtgctggagatgatccgagaagggaagattgcagggctgggccgtcctcattggaggccagccaggcacttgggaagacacnnnttgcnntgggcatggcccaggcactggnccccgacacaccattcacagccatcgcnggcagtgagatcttttttntggagannagcangactgaggctctaacgcaagccttccgccgttccattggtgtccggatcaaggagganacagagatcattgaaggggaggtggttga

SEQ ID NO: 2351 - DNA, 480 bp, Homo sapiens
  misc_feature (1)...(480): n = A,T,C or G
aggatgctcatcgcaggncacgcaagnnaagggtgctggactttcnataaacngnccgtgccctgtctgnaggagcngaactnnacagttcnaggcccaggnnattcctcgnacatgttnancaggtcnanttngntggnacnggttgacannttgcatgctcnganctttaaangtacagtctaaatccagtgaagagtcgggagattacgcagcagtcgagccagccttnttcccagccgccttcagtgcagtcagccattccccagacccagctaatgctggctgggggacagataactggggtaagttttccttgagaangntgtaangaacttcctatgtctgaacagccactggttgcatctcattaaaatggttcactacatccggccctagcatgcacnactgnccatanggagctgacggctagatgtggagtgctcctctggaagaggagaacttttgccattctttaca

SEQ ID NO: 2352 - DNA, 230 bp, Homo sapiens
  misc_feature (1)...(230): n = A,T,C or G
gtgttctctgaatgatgtctgccccacatcttgtatggcngnnactganccttgaangcaaccaagangctctctncanacctgngcnngatcctttgtgncctnaagnacttgctccagaggggtatcttacacagagatctcaagctgggaaattttttcatcacggataacatggaactgaaggtgggggattttgggctggcagctcgattagagcccccagagca

SEQ ID NO: 2353 - DNA, 526 bp, Homo sapiens
  misc_feature (1)...(526): n = A,T,C or G
gactgagacctccttagctacgtgttttgctcaagcagacatttgggaagcagtacaagcagacgataggactggatttctttttgagaaggattaccttaccaggaaatttgaatgttactcttcaagtttgggatataggagggcagacaataggtggcaagatgttggataaatacatctatggagcacagggaatcctcttggtatatgatattacaaactaccaaagctttgagaatttggaagattggtattctgtggtgaagacagtaagtgaagagtcagaaactcagcccctggttgctttagtgggcaataaaattgacttggagcntntgcnaacagtaaaagctgataagcacttacgattttgccaggaaaatggttttagtagccactttgtttcagccaagacaggagactctgtcttcctgtgttttcagaaagttgcagcagaaatcctgggaatcaaattaaacaaagcagaaatagaacagtcacagactgtatgagagtgcttcca

SEQ ID NO: 2354 - DNA, 114 bp, Homo sapiens
ggcctccgcttcccgccggcaccgccgagagcgacgcttccggcggtacttgtctgcaggacggctggtgcgagcccaggctctcctccagcgacatcccgggcttgatgtgga

SEQ ID NO: 2355 - DNA, 500 bp, Homo sapiens
  misc_feature (1)...(500): n = A,T,C or G
gactgaggtagggagcaactgatgggagggtaaaccttcctgctcaagatagctcggattcatgcaaccagaaggtcaacccagcaggatgcaggaagctcattggttttccccgnggacnctacgcngcgatagantaggagggcctgntgcggtgagccttgaagcctagnncgcagnncccgggtggagccgncgcaggtgcanatcttggtggtagtagcatatattcaaacnagaactttgaaggccgaantggagaagggttccatgtgaacagcagntgaacatgggtcantcggtcctgagagatgggcgagtgccgttccgaagggacgggcgatggcctncgttgccctcggccgatcgaaagggagtcgggttcaatatccccgaatccggagtggcggagatgggcgccgcgangcgtccagtgcggtaacgcgaccgatcccgganaagccggcgggagccccggggagagttctcccaaaaaaaaa

SEQ ID NO: 2356 - DNA, 178 bp, Homo sapiens
  misc_feature (1)...(178): n = A,T,C or G
ctggcctcctgcctgggtctggagctgcnangatgcatanccaggccccctggaagagctngcatcaacccctccttccttcantttnaactaaacttntatcaagtcctactttctggccntggnaggggactgnctccaagctccctacctgtataaactctatcagcattaccaa

SEQ ID NO: 2357 - DNA, 286 bp, Homo sapiens
  misc_feature (1)...(286): n = A,T,C or G
cttgtctcggaaccggnttcccgcggtgcctgaggcagcttgccagctggngtccctggaaggnctgagcctntaccacanttgcctgaattgcctgancccagccttggggaatcttacagccctcacctacctcaacctcanccggaaccagctgtcagnctgatgccaccctacntctnacngnatggcnccgagnatntgggtatattcgggatatgatgggaagntattgctttattngtnnccattataagctgcaacaaacaagttaacaacaaaaaaa

SEQ ID NO: 2358 - DNA, 285 bp, Homo sapiens
  misc_feature (1)...(285): n = A,T,C or G
aaagctgaggactggntttacagngtgcaggtggcggactcaactttcactgttctaaaacgttaccagcaacntgaaaccgatcggctctggagcccaaggaattgtttgtgcatgcattttgatacagttcttgggataaatgtggctgtcaagaagttaagtcgtccttttcagaaccaaacgcacgcaaagagagcctaccgtgaactcgtcctcttaaagtgtgtcaatcataaaaacataattagcgttgttaaatgtgttcacaccacaaaaaaaaaa

SEQ ID NO: 2359 - DNA, 541 bp, Homo sapiens
  misc_feature (1)...(541): n = A,T,C or G
cttcctgttggccctgacaatcactgncngcgtccaggctctgacccccacccactacctcaccaagcaggatgtggaaaggctgaaggcctcactggaccgccccttcacagatttggagtctgccttctactccatcgtgggactcagcagccttggggtacaggtgccagatgtcaagaaagcgtgtaccttcatcaagtccaaccttgatcccagcaacgtggattctctcttctatgcagcccagtccagccaggtcctctcaggctgtgagatatctgtttcaaatgagaccaaagagctcctgctggcagcagtgagtgaagactcccccattgcccagatctaccatgcagttgcagcactcagcgggtttgggcttcccttggcatccaatgaagccctcggtgcccttaccgctcgcctcggcaaggaagagactgtgctagcaacggtccaggctctgcanacagcgttnccacctctcccagcaggctgacctgaggaacattgtagaggcntcactgacaaaacataa

SEQ ID NO: 2360 - DNA, 520 bp, Homo sapiens
  misc_feature (1)...(520): n = A,T,C or G
gaactgaggatctccatctttcntcctggggcaggcatccttccagggacaggagctggaattccagcatggccgaggagaagaaactgaaactcagcaatactgtgttgccctctgagtccatgaaggtggtggcngaatctatgggcattgctcanattcaggaggagactttgccagctatngacaaatgaaanaaagctnccngcntcaagganattgcccaggangccctgnagngcatgcacatggggaaactcacataacctcactaccagtgactgntgactatgcattgnanttaaagaatgagaanccactgnntgnntnccatgctcagganttcatccctttccngantncctctggcgngggncgctnnctnnnnttctatgatcagaannaagtgcacctgagggncatcattgacccaccctntgccttngtngcctcttgnaaanctgcctcaaagntcattggntttctatnnaangctgccagacaaggtattccaggagag

SEQ ID NO: 2361 - DNA, 374 bp, Homo sapiens
  misc_feature (1)...(374): n = A,T,C or G
catctactcatgggccagacngtcctggcaaggggcagcagcagcacccctacctcgcaggctctgtactcggacttctctcctcccgagggcttggaggagcatcctgtctgctccccctcctgacctggttgcccaacggcaccacggctggaaccccaaggattgctccgagaacatcgatgtcaaggaagggggtctgtgctttgagcggcgccctgtggcccagagcactgatggagtccgggggaaacggggctattcgagaggtctgcacgcctgggagatcagctggcccctggagcaaaggggcacacacgccgtggngggcgtggccaccgccctcgccccgntgnaggctgaccactatgcgg

SEQ ID NO: 2362 - DNA, 512 bp, Homo sapiens
  misc_feature (1)...(512): n = A,T,C or G
gactgaggacgagtccggctgcagncaggnagcatctctccagattgaggggctccgggtggaagaccagggttggtacgagtgccgtgtgctcttcctggaccaacacagccctgaacaggattttgccaacggctcctgggtgcacctgacagtcaattcgccccctcagttccaggagacacctcccttagttctggaagtgaaggagctggaggcggttaccttgcgctgtgtggcccgtggcagccctcagccttatgtgacttggaaattccgaggacaagaccttggcaagggccagggtcaggtgcaagtgcagaatggaacactgtggatccgtcgggtggagcgaggcagcgctggagactacacctgccaagcctccagctccgagggcagcatcacccacgccacccagctgttggtgctaggtgcactttggtggaagggcaggggaaccggnccacctatagtagaagacatgatctntacgggggtgggggtggggg

SEQ ID NO: 2363 - DNA, 310 bp, Homo sapiens
  misc_feature (1)...(310): n = A,T,C or G
attactgaggcgtttctaacgtgttcagctcgaggccaaatgggaggggcccggaccaaccctccggagccaggtgtccggagaaaccagaaaactctctcacaagacagnntangntctaagtctgacatgtttgaaaaggcnnggtcngccacngatcncagcatctgnncacatgcctcacattntatccggcncagangtttggnntttcgngacacnntcgtgagatgncaccttntgnanaaggaagaganntatacctacatcctncaacttcagaaaantctaagacagtcaaaaaaaaaaa

SEQ ID NO: 2364 - DNA, 555 bp, Homo sapiens
gaactgagatcccaattatgctcatggctaacgaacgcatgaacctgatgaacatggcaaagctgagcatcaagggcttgattgaatcggctctgaatctggggcggaccctggactctgactacgcacctctccagcagtttttcgtggtgatggaacactgcctgaaacactggcttgaaagccaagaaaacttttcttggacaaaataaatccttctgggggcctctagagctggtggagaagcttgttccagaagctgcagaaataacagcgagtgtaaaagacctcccaggactcaagacaccagttggcagaggaagagcctggcttcggttggcattgatgcaaaagaagctttctgagtatatgaaagccttgatcaataagaaggaacttctcagtgagttctatgaagtcaatgccctcatgatggaagaagaaggagctattatcgctggtctcctggtgggtctgaatgtcatcgatgccaatttctgcatgaaaggagaagacctggactctcaggttggagttatagatttttcgatgtat

SEQ ID NO: 2365 - DNA, 531 bp, Homo sapiens
  misc_feature (1)...(531): n = A,T,C or G
gactgaggatagctatcccgtggagggcagcaatttcatcaccagctatttcctgaagatcctttggcaaaatggtattctttctgagcgaattgatccaaagcctctcatctgcatattcataagccattttctgtctcttcaaatcactcaacattctccagtctacatagtaaccttgaacttgacctgacacttgatggaggaacttgcctgccggaatgtccgcagcagcaagcctagcatggacaccgcattgttgtctgcccttctactctctttctatgtctatttatttagtgacccaatggatttcattagggttgtttacaaggtgtggccaggagttcgtttacaggagcgtgtgcaaatatctttctcctctattgacagttatcagacatgaattctcagggacgggtggaccctgtcaagcacttgaattttgtatatttatttctgttttctatacttgtcatccaataaagagaaacctgatgtttcatcagagncctccctctaaaaaaaaaa

SEQ ID NO: 2366 - DNA, 426 bp, Homo sapiens
  misc_feature (1)...(426): n = A,T,C or G
ttttgaggagcagtggagcaagcttnaaacaaccatctctggaaggggctggagcccaaggcggtctctgaatccgaagtccagtgccgagaagagagagatcgaggagaaactgcacgcgctcttcagccaagagcatctcgtgatatataaggggtatgttgacgaccctcggaacactgacaatgcgtggatggagacggaagccgtgaactaccatgatgaaacaggggagaccatggacaacctcaccctggaggccggagatgacgcagggaaggtgaagtgggtggacatcagcgaccagctcaagttgtacgccagtcactctcagttcatcaaactcgtggcagagaaacgagatgcccactggagcgaggaccacgccgctgacagccgtgggctatagcctgtccccgtgagcca

SEQ ID NO: 2367 - DNA, 286 bp, Homo sapiens; identical to SEQ ID NO: 71
  misc_feature (1)...(286): n = A,T,C or G

SEQ ID NO: 2368 - DNA, 356 bp, Homo sapiens
  misc_feature (1)...(356): n = A,T,C or G
tgagttgtaccccctgcaggaagaggccaaggaagaggaccgcctgcccgccttaaagaaaatcctgagctcaggggtgttctatttcacatgncccattganggtgcctgcttggatctgnccatcngggctcatnaacagggtagattgacgggtctgaatggngnncctntttcttntggaaccagctattgcgtgtgcctctgcggcagcaccaggtgaactgtcataactggttgctgaacgtcatctgtggggtggtgaccatccgcacagtntatgcctcccacaagcaggccaaggcctgtctcatntntcgcatnagcttgtgnacgcgcaggtgctcgttttctca

SEQ ID NO: 2369 - DNA, 453 bp, Homo sapiens
ctgagccttttaggtgtccctattgcatatgataacatcagagttgtgggtgaactaggagatatttatgatgatcaaggacacattcatcttaacattgaagcagattttgttattttctgccctgagcctgggcagacgttaatgggtacagttaataaagtatcagtctagccatattggctgtctagtccatggatgttttaacgcctctatccctaagcctgagcagatgtcatatgaggagtggcaaacattggagatacatgtaggcgatgaactggaatttgatgtatttcgcttagattcagattctgctggagtgttctgcattcgaggaaaactgagtaccaccagtttgcaacttaagcactctgcagtttctgaagatgtagcagaaactgtcgttgaagaggttgttgaaaaaactccaaagaagaaaaagaagaagaa

SEQ ID NO: 2370 - DNA, 421 bp, Homo sapiens
  misc_feature (1)...(421): n = A,T,C or G
gtatcgcagcgtatgcacnttgtggcttgcataggtcnactgcctctgantnagaggaananangctcggtncccggnngatntgaanttcctattngcaagccnntatncnctnctannggatnnnancttnnctggcctgcannnatgcnanctgnnggnggagaggaganctnnnaaatntctgagcagttcgaggccctggggtcatctattggagtgcagtgtgctgtcattgttggtggaattgattcaatgtctcagtcactagcattggccaaaaaaccacatatagtaatagctactcctggccgactgattgaccacttggaaaataccaaaggcttcaacttaagagctcttaagtacttggncatggatgaagcagaccggatactgaacatggattttgagacagagg

SEQ ID NO: 2371 - DNA, 361 bp, Homo sapiens
  misc_feature (1)...(361): n = A,T,C or G
gactgagacggtcagcngtcaataaggccattaatacgcaggaagtggccgtgaaagagaaacatgccaggacgtgtattctggncacccaccatgagaaaggagcgcagaccttttggtctgtggtcaaccgactgcctctctccagcaacgccatgctgtgctggaagttttgtcactgtgttccacaaacttcttcgagatggacatccgaacgtgagtccctggggcgtcaggggacgctgatggcacaggcagggactgtgacacctgagttcctctcctgctacccggtacagatgcctgcgagccgagacaggaatcgaaactttaaagatatgtttctatttaaaaaaaaaaa

SEQ ID NO: 2372 - DNA, 196 bp, Homo sapiens
  misc_feature (1)...(196): n = A,T,C or G
cacacttacctggagtggctgaaacactgagatgatcagaggggtttgtctcacagacccagacagcctgcatcttggcctaccaccgtgtcttcctcagtataggctgatatgcccagggtagtcctgaatggtgtgacagtggattttcctttccagccctacccttgccaacagnantatattgaccaagggg

SEQ ID NO: 2373 - DNA, 303 bp, Homo sapiens
  misc_feature (1)...(303): n = A,T,C or G
gcctccaggaggggctggggccacagtgcccacaggctctgaacctgcggcaggagagaaccccagccagaccctgaaaacaggagcaaagnctaatancatcatcgagagcccgaggcagagnttttttncctggggggaagctngccctgcaangngccctgggaatncggngaggtgacnccngantanggcgcctggaccncgagcacncttgngcccttntncnnagncctcccgctaccacaatncncnanccacactacncaccatgaacggccnnccagagccccggcgaagaac

SEQ ID NO: 2374 - DNA, 217 bp, Homo sapiens
  misc_feature (1)...(217): n = A,T,C or G
aacagagacagttctgagccgaggagtggataaccgtttcctggtgctagcctgggggagacctagcagaatgaaagaggagccgaggagaagcngcttgcacgtcacggcgtcccaggaccgagagcacgaagttctgtgcatcctgaggaatggctggcgatttgcatttncgactttgagccatgantngntttttttggaggggggggggcac

SEQ ID NO: 2375 - DNA, 506 bp, Homo sapiens
  misc_feature (1)...(506): n = A,T,C or G
atgtagattctttcatgaagcagcctgggaatgagactgcagatacagtgttaaagaagctggatgaacaataccagaagtataagtttatggaactcaaccttgctcagaaaaaaaggaggctgaaaggtcagattcctgaaattaaacagactttggaaattctgaaatacatgcagaagaaaaaagagtctaccaattcaatggagacgagattnttactggccgntaacctgtactgcaaagcttcagtccctcctactgataaagtatgcctatggttgggggctaatgnantgcttgaatatnatattgatgaagctcaggccttgntggaaaagaatttatcaactgccacaaagaatcttgattctcttgaagaagaccttgactttcttcgagatcagnttactaccacagaagtcnntatggccngggtttatatttgggatgtananccancntttcatngatgattctaccaagantnaagcttaacactggca

SEQ ID NO: 2376 - DNA, 163 bp, Homo sapiens
  misc_feature (1)...(163): n = A,T,C or G
aaaggtgatgatttatcaacagccattctcaaacagaagaaccgacccaatcggttaattnttgatgaagccatcaatgaagataacannagaggngtccttgtcccagcccaagatggatgaactgcacgttgttccgaggtgacacaggtgttgctaaaaa

SEQ ID NO: 2377 - DNA, 513 bp, Homo sapiens
  misc_feature (1)...(513): n = A,T,C or G
tgcgacccccattcctgctgccgtgggtagtggacgaagatgcgctggataacgttgcggggccggaagacnnncttggggaaaacatccagcagcaggttgtatactgacaagtcccgcntccacaccaaactctggcatcttgcgcagtgctaggtagatgaagtccacgtggccgcgcttgcgcacattgtgcgccccaaagctgcgcactgcntttatgaagctnggcttgtcccgctccctgtttcctgatggcttgaacnagtcttcatgcnttgctggaaccttgatngncttcctctggggctccgggggtcgaggaaccaaccacggctcatccttgtgtatagcttgcactacagtgaaaggcctcntaaagcctggagggacacctggggagaaaggatggggcctgctttttgtttttcttgtttctttggcaaaaggnaccctggacattaatgggaggacctttttanggcgctttnatanctggtactggctaacccg

SEQ ID NO: 2378 - DNA, 190 bp, Homo sapiens
  misc_feature (1)...(190): n = A,T,C or G
gactgaggagacctgcagatgccaaaacaaaggaacacttgggatccagacaacatgaagtagaatggcaaacttaccagagaattctgaaaaagacaagagtcatggaaaaaaccaagtggctggatatcaaaggaaatcatgatgcatatgccatncccagnctggagagnatctccctttattacag

SEQ ID NO: 2379 - DNA, 218 bp, Homo sapiens
  misc_feature (1)...(218): n = A,T,C or G
aactgagtggtagtcnctcttctaaaacttttaaaccaaagaagaacataccagaggggtctcaccagtatgaactcttaaagcatgcaggaagccacactgggcagcggcaacctacggatggctgtcatgcttcccgagggagaggatctgaatgagtgggttgcagttaacactgtggattttttcaatcaaatcaatatgctttatggaaccat

SEQ ID NO: 2380 - DNA, 323 bp, Homo sapiens
  misc_feature (1)...(323): n = A,T,C or G
gactgagagcctagcaatgccgtttgggtgtgtgactctgggtgacaagaagaactatanccagccatcggaagtgactgacagatatgacctgggacaantcntnaagactgaggagttctgngnantnttncgggccaaggacnagacatcgggcattgctgcanacctgtangatgntccagaagcgtgatngccnnntggtgngganggnanccaagaacgagattggaatcctcangatggtgaagcaccccancttnctgcaannggtagatgtgtttgtgacccnnaaggaatacttcntctttctggagctgtcc

SEQ ID NO: 2381 - DNA, 354 bp, Homo sapiens
  misc_feature (1)...(354): n = A,T,C or G
gactgagttatgccaagaaggaatctgatctcagtggagcccagatcaagcttcgagagtatgaggcggcactaaactctaaggatgcggctgctggctactgccctaggggacaaaaagagtttagagggagacttggaggatctgaaagatcagattgcccagcntagaagcatccttatctgccgccaaaaagcagttagcagatgaaactttacttaaagtggatttggagaatcgctgtcanagccttactgaggacttggagtttcgtaaaaatatgtatgaagaggagatcaatgagacaaggaggaagcatganacccgcttggtggaagtggactctgggcgtca

SEQ ID NO: 2382 - DNA, 453 bp, Homo sapiens
  misc_feature (1)...(453): n = A,T,C or G
aggaaacacttcctttcaatttaaccaagacaatccagcaagatgaatggcacctgcttcatctaagaagaataacagctggcttcctgggcatggcggtggctgtcctgctgtgtggctgcatcgtggccaccgtcagcttcttctgggaggaaagcctgacccagcacgtggccggactcctattcctcatgacagggatattttgcaccatctcgctctgcacgtacgccgccagtgtctcctatgatttgaaccgggtcccgaagctaatttacagcctgcctcatgatgtggaacatggctacagctggtccatcttttgtgcctggtgcannntangttttatcgtggcagcttggaggtctntgcatcgcttatccgtttattagccggacgaagattgcncatctaaaggtctggcagggactccacggtatgacggactgcacc

SEQ ID NO: 2383 - DNA, 398 bp, Homo sapiens
  misc_feature (1)...(398): n = A,T,C or G
tactgagatatcggagctctggtggatngngctacagntganccatnagtaaccagaagccctnntaaagcatcatctncctantgggcactntgggcttgactgnnactgngagnnttggactcactgnntcctgtgctctgtgncaangctcaaaagagccctggatccccacatacaccgcacatcaagtggtcgtctgaaacctgtatgatttcaatatcattctatgganggctgaggctcctcacctgagaccaggagcatccacggattcacattggaggngaccacncatatgggctgttcctggcataactgnaacanctgcatatccatctctgggtgggggtcacagggccnacagagaacagggcgtggtacttccttgtagagta

SEQ ID NO: 2384 - DNA, 430 bp, Homo sapiens; identical to SEQ ID NO: 72
  misc_feature (1)...(430): n = A,T,C or G

SEQ ID NO: 2385 - DNA, 534 bp, Homo sapiens
  misc_feature (1)...(534): n = A,T,C or G
tgccaactctacaagcgggccacgctggacgaagaggatcnggtggactcactctccgagatggcctggcaggtaaggctggaaaggactccggaaaggccaagacanaggcggtttcccgctcgcagcgagccggcttgcagttccctgtgggccgtnttcatcgacacctgaaatctangacaaccagccacggacgtgtgggcgcgaccgccgntgtgtncagcgcagccatnctggagtacctcaccgnataggtacttgagttggcaggaaatgcgtcaaaagacttaaaggtaaaagcgtatcacccctcgtcacttgcagcttgctataccgtggagatgaanaataggattctctgatnaaaagcttccattgcttggcggnggtgtcattccnacacatacacaaatntnttgatcggnaanaatggaccacanacnattnntttaaggattgcctggattttctttattattctcagggantcntanattnttntctaacaagntgttccagatgtttggagat

SEQ ID NO: 2386 - DNA, 478 bp, Homo sapiens; identical to SEQ ID NO: 73
  misc_feature (1)...(478): n = A,T,C or G

SEQ ID NO: 2387 - DNA, 377 bp, Homo sapiens
  misc_feature (1)...(377): n = A,T,C or G
agtctgaggactgctagcgaggacaccacccccaactctgagccaaatgctgnncacaattctctgacccgaccgaattcctcgctnaccagaactcatgttgcactgacccaccggtaatggtgataattggaggccaggagaatcccagcaactcttcagcctcctctgcgccccgaccagagggccacagtnggtcccaggtcntggatacagagcacagnttttttcccagatnnngggtcctctgggcccccggatcccacttgggggccanagccgnaggggagaggaatctttctgggcaattcctggtcgctgccacagggaaggagatgtantctcccttccccnagcctnnaaaccttgttttgtat

SEQ ID NO: 2388 - DNA, 444 bp, Homo sapiens
  misc_feature (1)...(444): n = A,T,C or G
cgatagatgaggttttgctgncanttcaagtaacgagaaatggaaggttctgcgaaagcgtcagtcgcttctgacccagagtcccctccaggtggtaatgagcccgctgctgcctctgggcagaggcttccagaaaatactcctccatgccagcangtagatcanccaaaaatgcaagaaggagtttggggaggatcttgtagagcaaaatttcgagttntttgcaagattntncatccaagaaaaggaaacttgatgttgaaatcatcttagaggaaangcactctgaggatganggaggntcggcanagagaagcaaactggaaagaggtgatgtgtcggaaagatgagccttccctnngntnggnttatccagaccangagaaaactgtcagcnntcaggacnatgaggtaccgnaaaanttgcaaaaagcctggaaggaa

SEQ ID NO: 2389 - DNA, 482 bp, Homo sapiens
  misc_feature (1)...(482): n = A,T,C or G
actgaggattgaaattccnagatggatgatcaggaccctgggggcattagcccccttcagcaaatggtggcctcaggagccggggctgtggtcacctccctcttcatgacacccctggatgtggtgaaggtccgccttcagtctcagagaccctcggcaaccagcgaattgacaactccctccagattctnggagtctctcctacaccaaatcatcctccgctctacagtccccagggaagtgcctcctatactgcaatggagtcctggagcccctgtacctgtgcccaaatggtacccgctgtgccacctggtttcaggaccccacacggttcactggcaccttggatgcctttgtgaagattgtgcggcatgagggcactaggaccctgtggagcggcctcccagccaccctggtgatgaccgngccagctactgctatctacttcactgcttacgaccaactcaaggccttcctgtgtg

SEQ ID NO: 2390 - DNA, 512 bp, Homo sapiens
gaggccggaccctgccttgaagaccccttaagtaaaataggagatgagatcattgcagtaaatgagcttctaaataaatttgaattggaaattcagtatcaagaacaaactaacagttcactcaaggagctctgtgaatctcttagagaagagtgtgaagatgtggaacatctcaaagaacacgtccctccccatctgcctcaagtgacggcgacccagagcttagttcacaagcccgagccggatcctaaagagtcagacaaagctgaggagcctggactgccgaagaagccccccagagagcagagagttatcaaggaaatgcaatttataactatggatgaattcagtgacgttcctgcgtacatgaaatcccgtttaacatattgtcaaattaatgatattattaaggaaattaacaaggcagtagttagcaaatataagattatgcatcaaccaaaagcatctatgagctctgtgaagagaaatctctaccagagatttattaatgg

SEQ ID NO: 2391 - DNA, 347 bp, Homo sapiens
  misc_feature (1)...(347): n = A,T,C or G
gactgagtgcttgatgggcggcattatggcccctaaagtacataatgacaaacactcacgctaagtccatcctcaactccatgaactccctcangaagagcaacaccctctgtgatgtgaccttgagagtggagcagaaagacttccctgcgcatcggattgtgctggccgcctgcagtgattatttctgtgccatgttcactagtgaggtnaangcnantanctggtncctangtgaaattcnnattgtaaccntgcatacnntttatttcatgggacnaattngngtanngttgnagattcnnttatngnntnngtaacccaattggncaccatggttaatcttg

SEQ ID NO: 2392 - DNA, 456 bp, Homo sapiens
  misc_feature (1)...(456): n = A,T,C or G
actacgcgctggtttttantgtggagnaagacaaacaaacaggagagaccaagattctttttgcatccaccattggcccagagggggtccatcagagaggagtcaaagtctatgatgatggtaccaaagtagtgtatgaggtgcactcgggaggcaccgtggtagaaaacggagtccacaaattaagcgcaaaggatgtggaagagttaattcagattnnngnacagtcgagcttcagaggacacatgtcanaaaggactgttgttgcagatgggagcctgggccatcccaaggaacacatgctctgcaaagaggccaagttagaaatggtgcaaaagtccaggaaagatcagtcttcaggaaaccccgggcagcaggcccagccccccatcacagaagagccaggggcaaacctgnatcaaccagncaccatgattttttatgggctaccaaaac

SEQ ID NO: 2393 - DNA, 488 bp, Homo sapiens
  misc_feature (1)...(488): n = A,T,C or G
actgagaagaggggtcccgagcgcggctgcgggaggattacgacagtgnggagcaggacggcgatgaacctggaccacagcgctctgttgaaggttggattctctttgtcactggagtccacgaagaagccacgtgaagaagatatccatgacaaattcgctgaatatggggaaataaaaaatattcaccttaatttggacaggcgcacgggatacttgaaggggtatactctagttgaatatgaaacatacaaagaggctcaggctgccatggaaggactaaatggtcaagatttgatggggcagccaatcagtgnggactggtgttttgttcggggaccaccaaagggcaagaggagaggaggccgaanacgaagcaggagtccagaccggagacgccgttgataaatcctctgncgactgggnggnctctctacaagnccattnggntatgctgccttggataaacagggctagggcggaccttg

SEQ ID NO: 2394 - DNA, 520 bp, Homo sapiens
ctgagctttggctaatgagcaaagtgccgaggtcatcgagcgaggcagaggacatctgggaaacagaggatgacatgaccgaaggtgacctaggctatggcctcggaagaaaacccggtggtatttatgaagttccgtgttcgattacatctaagaaaaggtcagatggaaagaactcaagccctcctccgtttccaagaaagggagaagaaagaagcgaaaccagtttccagtattccaggaggaagggctttcaagatacaagcgctgagggataccgagcatccagactgagcagcacagattctaactcagaattgtcggatgagcagttaaggcgacgtcttcatgaagccttagaggacgtagagattttaaaaacggaacttgaagcgtctcaaagacaacttgaaggtaaagaggaagcattgaaaatcctccaaagcatggcaatgcttggcaaagccacaagccacacacagacaatgcttcaaaaaactatagaacaaaagagagcggg

SEQ ID NO: 2395 - DNA, 320 bp, Homo sapiens
  misc_feature (1)...(320): n = A,T,C or G
gactgagcatgtcgttcagcttgagcnngagtccncaggcaggagacatactggttaccacccaatgtcacatgggcagagctggaggaccgtgatggcctggtgttcgcccaccctcaccacgtgcttgctgccttcccagtggctctggtcctggtggctgtgcgaattgtctttgagagatttgtggccttgcccctgagccggtggatgggtgtgcaggatccaatcaggagaaagataaagcccaacccggtgctggagaagtacttcctcaggatgaagcagtgtccagaggagactcagatggtccagcctgg

SEQ ID NO: 2396 - DNA, 272 bp, Homo sapiens
  misc_feature (1)...(272): n = A,T,C or G
gactgaggtggggtctttcagtatcatgtggagccaggagggtttcctcagtgcaaggcaatcctggaacctncaatgaatcctcttcatcctcttcctccaagcgtgtccaggatgtcttgggcatcggggtggacgagatcggcccacgtctcccacagtgggtgaacaatatagtcgatgaagcccacctagaagagagaaatataggtctaaacaagtggtttggtggagcaagcaaaaggatctacttaattaaaaacaatcttcca

SEQ ID NO: 2397 - DNA, 565 bp, Homo sapiens
  misc_feature (1)...(565): n = A,T,C or G
gactgagaactttattgttacgggcttacaggacatagataaatgcagacagcagctgcacgatatcacggtgcctctggaagtttttgaatacattgaccaaggtcggaatccccagctctacaccaaagaatgcctggagagggctctagctaaaaacgagcaagtcaagggcaagatcgacacaatgaagaaatttaaaagcctactgattcaggaactttctaaagtgtttccagaagacatggccaagtatcggagcattcggggggaagatcacccaccgtcctaagtgaagatcccatacccttgtaataaccagactgagccagtgagaagctgtgcctgccactgctgccttccagccacgtgaactggcctggcccctacctcctgtttccatcattttgatcttgtgggactcgggctgggggagcanagctgtgcctcagctgtccctgcagctnttanaccctnggngaccccttntttntccaggggaacaggcaggaagacaaccgtgctgaaatgtgaaatgnganggggctcctacttgacatttctt

SEQ ID NO: 2398 - DNA, 388 bp, Homo sapiens
  misc_feature (1)...(388): n = A,T,C or G
atggagagacagactggaagcttcggntcnnggtggcctgnacacagaggcttnccacggctgctgacctcctgcngattcggtcctatgtgtacgctgaagagcccaacatcggacattcacaacttcctggggactttcaccagggngagcnggngntgantccagccttgngngtgcggccctgacnatngcccgaggcngcnanctgctgtgtctatctgaggtttcttaccaaagcccagccagccttgaaggctgacngtggcttttntgtggggacagcncanctggaatgtgttgtgacctggctctgcctntgagnttgagtnctanancagnaggnggtgtnttcatctgctgnagcttntgaagtctgaacacaacc

SEQ ID NO: 2399 - DNA, 533 bp, Homo sapiens
  misc_feature (1)...(533): n = A,T,C or G
gactgagttcttccccncactgggagatgtcctccctacctgggtcccgggagcccctgctccgtgtggntgtgactggaggcacccacgggaatgagatgtgtggtgtctacctggcccggtactggctacagaacccaggggagctgcagagacccagcttctcagccatgccggttctggccaacccagcagccacagntgcctgttgccgttacctggaccgtgatctcaaccgctnntgcaccctcaccttccttggttccaccgctacccctgatgacccntatgaagtgaaaagagcccgagagttgaaccagctgctgggtcccaagggcacaggccaggcttttgactttaccctagacctgcacaacaccacagcaaacactggagtctgcctcatntnttgaatccaacatcttccttnaacttgcacctgtgccactacctacagnggnagaacccggggatgccctgccgcctttttttgtatgagcccancttggnacggaaaacctttaacgtggaat

SEQ ID NO: 2400 - DNA, 414 bp, Homo sapiens
  misc_feature (1)...(414): n = A,T,C or G
gactgaggagtttttggcctttgaggctgtggctgtggagttcagccaggaagaatgggttttgctggatccttctcagaagaaactatacagagatgtgatgctggaaacctgcaataacctttcttcaataggcatcaaatgggaagacaagaacattgaccgagcagtacaaacactcttggagattcctaagaagttgcatgatagatgcaatttatgagcacagagaaggtggtcagtttcaagaaacctttacctggataccagatttccgtaggagtactgacatttctactgaagtaaaaccatttgaatgtggtgtgtgtggaaaagttttcacgtgtcattcatcctttaatgagcacatcatgtctcacttaggggacaaaccntnngaccacaaccttggtt

SEQ ID NO: 2401 - DNA, 349 bp, Homo sapiens
  misc_feature (1)...(349): n = A,T,C or G
gactgagacacaggtgatctcaggagatngacagaggaagaaatgtgcgaagcacccagacggctgaacccagtcaggaaaaagcagagtggactcacgcagcagggtggggacggaagcagctagtcctacctgcagagagtagtgcagaccagagcaggctgggtgtagcgtgaggttctggaagggctggatccttggtgggccccatccagccttgttattccactccaccatcagcatgtggtctgtgaaggtcttcccaaacagcagtgcctggctaggggctggcttcttctgtggttctttggtcatctgaatctggaggtctgcagcctgagagaaagaa

SEQ ID NO: 2402 - DNA, 226 bp, Homo sapiens
  misc_feature (1)...(226): n = A,T,C or G
ctcagctttactcagagttantgcncctggacttgcttnntggtnctgaatnttantactgagatgcagatccctcnaaccacanagttctaggttgngtntgnnngtnctcagtctctaccttattttgctgctaaattcaacctcagngtcactgatgcatctanaaggctgtgtggcttcctcaaaagtcttggggtgcactatgtattcgacaccacaatcg

SEQ ID NO: 2403 - DNA, 540 bp, Homo sapiens
  misc_feature (1)...(540): n = A,T,C or G
gactgagcttcgagactccgctccagnagctttctaaagaagcttgctgtcaggagctgaaggtggaaatggagagctataaagaaagcagtgccagaaagtcagctctcctcacgtctctgaggggcaggatggaggagctccaggaggaatcagcagctggtttcagcttctaaaagcagagcagaggcctctgttcacgccatgatgaaggagaaccaggaactaatgaagaaagttctagaactggatgagaaattacagaactgntntnnggaacatgncncntntngtaancgangctcntagcacctnngnnggccctangnnttgcgggctcntttnnnngnttgtttgantntncnnttnaacnctgnctnggcatccnatgatanancntcttttatcnnttaaaagagctgaacaaaggagcccacnttcctgaaaggacagctcgctactcttgaagagactgtaactgtccatgagatggaggcaaaggctaacagagaaactatcaggaggctggcagccgaagtt

SEQ ID NO: 2404 - DNA, 459 bp, Homo sapiens
  misc_feature (1)...(459): n = A,T,C or G
tttttattttgatgaagtctttggtgaggcatgctgcaatcaagatgtntacctgaagactgctcaccccctcattcagcatatttgtcaacggaggaagtgccacttgctttgcatatggacaaacaggtgcggggaaancctataccatgataggaactcatcaaaacccaggattgtatgctctggcttgccaaagatatcttcaggcagcttgntnntatcccagtcaagaaggaatctctttgngtggatcagnttctatgagatntactgtggacaactttatgacctcctagatagaagaaaacggnactagatangagtgagaaagaagcctgtgctctgnacttgnctgntggagccggagctccacanaatccctttgatcgcttgactttaatgagaggcattttgtganatagcagtctntggcatgnagggatctttcttctccct

SEQ ID NO: 2405 - DNA, 357 bp, Homo sapiens
  misc_feature (1)...(357): n = A,T,C or G
tgtagtaaaaaatcaaaactgatgaccaggagaaagaagnncagagatggnnnccagccaagcgatggggccagcccagccaaggagagtgaagagaagggagagttccataaattggctgatgcaaaaatatttctgagtgactgcctggcatgtgacagcatgtgtgactgtggaggaaggtgtccagctttctcagcagagtgccaaggactttnttcatgtcctgaatcttaataagacaagatttctttgtgtagccctggctatcctggaactcactctgngcggatcaggctggccttgaactcaagagatcntgcctgcctctgcctcctgagtgctgggattaaaggc

SEQ ID NO: 2406 - DNA, 383 bp, Homo sapiens
  misc_feature (1)...(383): n = A,T,C or G
aatggattggtcctttctacctggcaccntanactnaggcatgnagnatctgnccacccntaggacntnagttgtggcctagctncccatnnccagtggctcacagntgtatgtanctncagcttgaggganggacctcccttgtcatctgcccccacccccagcatacactgcacaaatgaaataatgattttacacnttangnaacatnaaantnnctttnngncttnntgcngctccttcgtgaagcagaggagagcagtaagatcctgtgctcccnntaccatgaagaaatttgaagattctgaaaaagctaagaaacctgtgaggtccatgattgaaacacggggggaaaagaccaaggaaaaagctaaaaaaaaaaa

SEQ ID NO: 2407 - DNA, 189 bp, Homo sapiens
gactgagatttctgaagtgaaaggaggagtctgcaccctggtcctctgtgtggtgaagatgaaagatattgacatgggaaaagaatatatcatccccagccctgggtacagaagtgacagggacagaagcgctgtaccagggcaacacagagaccccgaggaacccaggttccggagaacaagatcgtt

SEQ ID NO: 2408 - DNA, 152 bp, Homo sapiens
  misc_feature (1)...(152): n = A,T,C or G
aagagcaagctttgatgagccggcaccatgggatcggccattgaacaagatggattgcacgcaggttctccggccgnttgggtggagaggctattcggctatgactgggcacaacagacaatcggcttgctctgangccgccgacatggatc

SEQ ID NO: 2409 - DNA, 510 bp, Homo sapiens
  misc_feature (1)...(510): n = A,T,C or G
tccatgtatatgtatatagaatttaaccccctccacatcgtatggtcagactgaagaagacntaaccaacaatcgnctgaattctgactgactcactgatagtcccaggggaaaattagaggtcactactctaacataagctgcttccttgcttgctgcaaagatgcttgacataaaggcttgggctgagtatgttgtggagtgggctgcaaaggacccatatggcttccttaccacagttatcttggcgctcacaccactgttcctagctagtgctgtactgtcctggaagttggccaagatgattgaagccagagagaaggagcaaaagaagaaacaaaaacggcaagaaaacatcgcaaaagctaaacgactaaagaaggattgaaggggcgcacagactgtagccagagaaaaccactctggaaaacctgcagctttggaaggactctcacnaaatttccaggctgttcctgatagtattatttagngaattaatctgaccgtcca

SEQ ID NO: 2410 - DNA, 219 bp, Homo sapiens
  misc_feature (1)...(219): n = A,T,C or G
gatgaaggatcaacgtgcanccattatactggctgagnactgantnccacctcaactatnccactttgctaacttgtcttctnactnaggtgtccctgccctntgncatgagcntngacacagagtccaatttttaacagnnngnncccacacagtcaggcatctgttacccagaatatcacagtggttcctgtaccatctacaggactcatgactgcg

SEQ ID NO: 2411 - DNA, 206 bp, Homo sapiens
  misc_feature (1)...(206): n = A,T,C or G
gcgtgcaatgggtgccntccccgatttgtttntnagcgtggncccaagctgannnnanngncntnccttgaaatatgaacnggggacaagggngcaggngtgccacgcaataaatatttgtcaaagtctanatggccctgccctggctgctcagaatagngagggagnggataaataaataaaggngctgggagctgggaagatgg

SEQ ID NO: 2412 - DNA, 201 bp, Homo sapiens
  misc_feature (1)...(201): n = A,T,C or G
tggctagcaggctgcagacaagcacccctctttccgncaatactccggctacctgagagcancggactccaagcacttncactactggttngcggagtcgcanancgacccnaagaacatgaccngnggtactttggcagtctctctaaccttcangncactnagcctacagtgaggcatgaatttcaaaacaccaccgtg

SEQ ID NO: 2413 - DNA, 397 bp, Homo sapiens
  misc_feature (1)...(397): n = A,T,C or G
gactgaggtgggtttgggctgnggtgggacctgggcngcaggcctacttacttcttgcggaactctcagaggtcaggacaggaagcntggcatggttccatatntntaccgagctgaggaggctgtgnngctcntaangaccttntacaaacaggagaacccaaangcgccnaaatcaaaagttcggaaaaaggattgtcagaaatcctgattntgtaatgatcancgnctagtacagtttggagacctggacagaattcctgaccgagagccgntgacgncgctggtcacgtttatatgttattactgtgngtaaaaatggtggncnctcgtcattngctctgttaaaggaacaaattagcccttttaaaaatgtctggcaatgtaaaaaaaaaaa

SEQ ID NO: 2414 - DNA, 259 bp, Homo sapiens
  misc_feature (1)...(259): n = A,T,C or G
actgagatggtgctttggcctggagtgacgatgctgatggaggcaggggaagagagatctctcgagattttgccaagctgtatgaactagacggtgatcctgaaaggaaagaatttctggatgacctcttcatcttcatgcagaagagaggtgatccagctgctgcagctgagtgcactgcttttcttcttccatctctaattgtcattaaataccctggaaccncccagctatccacagtantgcaaaaggaaaaaaa

SEQ ID NO: 2415 - DNA, 517 bp, Homo sapiens
  misc_feature (1)...(517): n = A,T,C or G
gaacttgaggaagttcccgtggacngccttcnntgtgacgtgcannggagtcctcgttacngccggtgnnagggtgcnncctggagccgtgtaccgtttggagccccggcnntcgtgggggganaggcggttttgggtctctgcttcgngcacnttggtgcacagctagagaagacaaccaatagagaagcctgccgggatctcagtgggaggagattacgagatgtcaatcatgagaaagcgatggctgagtgggtaaaacagcaagctgagcgagaggctgaaaaggagcaaaggcgcctggagaggctgcagcgaaagcttgccgagcctgcacactgcttcaccagtcccgactaccagaggcagtgccatgagatggctgagcgtctggaggactcagtcctcaaaggtatgcaggctgcatccagcaagatggtatcagcagaaatcactgagactcggaaacggcctaacaagtcaaaaacggaccaggaaactagtgcaaaaaaaaaaa

SEQ ID NO: 2416 - DNA, 158 bp, Homo sapiens
  misc_feature (1)...(158): n = A,T,C or G
acacatctgaaagtatacancctacatctatggactgnttaccccagctcaccatganagcantcatccagnnaggggntgctaaanaaaatgcacatggancgggantttnctaagaagaatgcactccttgacccaaatacaacactggaccagga

SEQ ID NO: 2417 - DNA, 285 bp, Homo sapiens
tgagctgagtttggtctgtgccagttccagttccatctccctcagctgcttcttaagtgagtccttttcatcatctgcttcaagtccctggtcctctctatttacggccactggctttaaagctccttccttgctgaagatatcactgcagtgtttgcatgccatcatcttaccctgaaacacacaaagagacacccaacattaaactgtattgtatagggtaaacaacttaccaaaataatatatgattttaacaatggcacattgctttcaaacagaaaaaaa

SEQ ID NO: 2418 - DNA, 345 bp, Homo sapiens
  misc_feature (1)...(345): n = A,T,C or G
tgagaaggccaggatncagcgcccttcaatggaccctcagngcatcgagaaggcctttcccaagcggaagacaagtcntgcttcatctatcttcaaaagcacttgcaaagattcccaaaagggaggngggagaagctagaggatggctgagctccctgagagcccacattatgcccgctggcattggacgtgcccgggctgaactctttgagaagcagattatccaccatggcggccaggtgtgctctgcccaggccccaggagtcacncncattgnggtggatgaagacntggactatgagcggnctctccngnttcctnagnnngccccagcttaccccctgg

SEQ ID NO: 2419 - DNA, 313 bp, Homo sapiens
actgaggaagcagaatatggtggacatgatcagatagatttgtatgatgatgtcatctctccatctgcaaataatggcgatgccccagaagatcgctgactacatggatactcttccaccaactgtggtgatgatgtgggtaaaggagccgcaccaaacgttgtgtacactttacactgggaagagaatctgcattgtatattggaaatctaacatgggtaaggaaagctaacagactggtggcaggcatttgaactgctctagtcatacatgtttttgccgagttttttttttaaaaaaagaacattcctat

SEQ ID NO: 2420 - DNA, 540 bp, Homo sapiens
  misc_feature (1)...(540): n = A,T,C or G
gactgaggtggtggtccagtggctggacagcactggncagccaaggacggnttgcgctccaccatccgtgaaaacntcaattatctgaagcggnactctgtcctcangaccatccaaagtctggnncaagaacatccagaggtcatcatggactgcgtggcctacctgagccagcacctcacgccagccgagcggatacaggtggctcagctgctgtctaccacggagagcccagcttcctcctgangagcaacttctggccatccccaggaccctggacggngggatggccatgcggcaggccttcgagggacacgggcttattttgggaaaactcacggagccactccgaatgtagctgcggttcctgaccagcgacttntggacagaaggcccctgggcccctgctaaggcgggcccagcctntcctcacctggggacttcagggtttgtcccagtggataattntgccactgnctctctgaggccaactgaaccaggcacaccgagttncttggggtttntgcctgagggggggat

SEQ ID NO: 2421 - DNA, 511 bp, Homo sapiens
  misc_feature (1)...(511): n = A,T,C or G
actgaggcagcatcttgccagtgaccgtttatgaccagcatggcttccgtgtcctcttccattttgctcgggacccactggnagggcgctccgatgtgctggtggtggtggtctctatgctgagcacggcgccccagcccatccggaacatcgttttccagtcagccgtccccaaggtcatgaaggtgaggctgcagccaccttccggcacagagctgccagctttttnccccatgggggnacccctcagccatcacccaggtcctgctccttgctaacccccanaagganaaggttcncctccgctacaagctcatcttcactatgggcgaccaagacctacaatgagatgggagatgtggatcanttccccccaccaganacctggnggagcctntatganaacanggnntgaagagaaggaagnncaacatnacctgggacctgttcatcctgtgcntntctnccctcctnnggccnccaaaagattattaccccctcccttattccc

SEQ ID NO: 2422 - DNA, 501 bp, Homo sapiens
gactgagagtgaagacttgactggagatgtctcaccccagcctagctgcaaacccccggaatgcactgggcatggcctctggagccgcacagaacagcagccagatggcctgtgacagtgagatcccaggcttcctggacgcattcctccaagacttcccagccccactgagcctggagagccctttgccatggaaggtcccagggacagtcctgagccaggaagaagtggaggctgagctgattgagctggcattgggcttcctgggcagcaggtaggcatgggctgcctcaaaagagaggagcttgatggacaggacaggatgcagcactgcccaccaggtgctgacctcgagcctacctaagtctcaggagaggggcgtggtcaccccttatctatacattgtagcagaacctgaaagttcagagagtgatgggccctgtcatccagtgccgtctcttcctgagtaaatgctcagctacactagaccttgccactttg

SEQ ID NO: 2423 - DNA, 159 bp, Homo sapiens
  misc_feature (1)...(159): n = A,T,C or G
gactgagatgctggagggagcacagctgcctgcgtggattttacaatgggagatgagaatgtgaacacaggactgcccgtgctgcccagagaggtcatctgtacctggttngggttntttttttttttttttttttggggggggaaaaaaaaacccccc

SEQ ID NO: 2424 - DNA, 488 bp, Homo sapiens
  misc_feature (1)...(488): n = A,T,C or G
cctgatcttctgaattgcaaccatgttgtcnaaatgcttgcnncattttctaaangccacaatctcccatccatatccagcgtcatattcttggttaataagcanacacagattttatnganctgtgccagcagccatgttgcgcagacgagttgtcatcacaggcattggcctanngacaccacttggcgttgggactcaactagttnggnatcnggttctccnagganaaagtgnaatnnttctgtggttggtgatgagtacaatgaatatcccttgcagtgtagctgnttatgtaccaacgaggccacatgaagggcagcaaatgaagaaaacttttgtgtccaaatcagatgccaagctccatntcttnttncccatcatggctgttggggcagcaaagttggccctgaaagactccggctggcatcccgaaacgagaagcagatcaaggtggctactggcgttccattacagatggttgggag

SEQ ID NO: 2425 - DNA, 496 bp, Homo sapiens
  misc_feature (1)...(496): n = A,T,C or G
agtttagtgatcccacaccatacatagtgcaagtcttgtttaaaatggcaatctgaaggaagtccagcacctcagagattcccactttgataagtttatcgtccaagccgagaataagagcaaagagaaacttttccttctactgaagtgatggaggccggacagcagtggcctgggaagacagacttttatctgcaattaccaaaagtggagctccatgcccacttgaatggctccattagttccactaccatgaagaaactgatagccaagaagccacatcttaaccgttcatggtnacatgaccatgattgacaaggggggaagaaaaggacttttccaagaaattgtttccagatgttccaagtttatacatcagccttaccttactagtgctgaaggacatccttgatgatcacaaaagaacgtcattaaggaaattncgcanatgaatggtgtcaaagttaccctgggannttgaggaacacctccatcc

SEQ ID NO: 2426 - DNA, 439 bp, Homo sapiens
  misc_feature (1)...(439): n = A,T,C or G
tttaatctggcagagcggaaagctaatgcccactcagtagtggaacgtgaccatgcacngaaagaagtcagtgtacggactgcagggctgacggacaagacctccaagaaaacatacactgtttgttatggtgtttggagcatctacaaaacaaattgatgtttaccgaagtgtcgtttgtccaattctagatgaagttattatgggctataattgcaccatcttcgcatatggtcagactggcactggaaaaacttttacaatggaaggtgaaaggtcacctaatgaagtatatacctgggaggaggatcctctggctggtataattccacgcactcttcatcaaatttttgagaaacttactgataatggcactgagttttcagttaaagtgtccctattggaaatctataatgaggagctttttgaaaaaaaaaaa

SEQ ID NO: 2427 - DNA, 482 bp, Homo sapiens
  misc_feature (1)...(482): n = A,T,C or G
cgaaacaccttcccgcagtgttgcacattggcttggccttggaaaaccttgcatccagctcttccccggctgttctccagctcatatggactctttacactggctatgttagacatggagtgttctttcagagcacaatgtgacctgtgatttccgacgtttncgtttgacttgtaacagtttgcacaatatcttgggttggaaaagtattttccacaaccgaggtcaactnaagntctgaactgncatttccttgaatgatttgctctactacaggtgaggacaactngctcgtntctaggaanaattccacanacgcgctctntagaacgncactggggtactgcactgctttgctctgccctggtttctgagaactgaaggccttcttcttctttttactttgagacgatttctttgtcaatgcccgnggtttagggtttgcctgaactgagnccgnggagacttctgatttctcccga

SEQ ID NO: 2428 - DNA, 198 bp, Homo sapiens
  misc_feature (1)...(198): n = A,T,C or G
agactgagcaggtggacattatggctgacatgcaaaatcttgtagaaagattggagagggcagtgggccgcctggaggcagtgtctccntctgacanccaanaggaagggagaggagctcccnncagnagcctnancctgtgcttttgtgcattattctgagaataaatttctgtttcaaacaatgtaaaaaaaaaaa

SEQ ID NO: 2429 - DNA, 403 bp, Homo sapiens
  misc_feature (1)...(403): n = A,T,C or G
tacatcaaagaaaagangtgcaggtctgggccctgctggctgggtagctcagccccaggctccatttctgcttcctgctctcttctgctgctgctcttgttccttgtgctgagcgcccttccagagaatccaggtctccagcaacttacccgatgttgaccggccctgactgaagaaggctggtcaactgtgcgccttcagtgtancaggatcctggtgaatcagtccatctacagggaactctgggaccgtctatggcaattgccagacacatcgatagagacagagaagagaatttggagactgaacctcatccagggatgtanggacgggactgaggacaagcagaggactcgaggacaggcaaagactnaacttggagccaggagacttcaactcattg

SEQ ID NO: 2430 - DNA, 411 bp, Homo sapiens
gaactgagaatatgaaggttgagatcgctgcaacagaaagaaccttgataggatttttccttgcaaaagttcacaaaattgaccctgacattcttgtggatgaggaacaagaacagatccctgagttgccagatccaaacttagagatgggcattttgcccagagagattcggaaactggtagagcggagaaaacaagtcaaacagctaatgaaacagcaagatttaaatccagaccttgttcttcagtatgacatccgacagaaggctttgaagctcacagcaaacagtatgtatggttgcctgggattttcgtacagcagattttatgctaaaccactggctgccttggtgacatacaaaggaagggaggtaaattgcaaaataaaattgccatctgtaaaaaaaaaaa

SEQ ID NO: 2431 - DNA, 239 bp, Homo sapiens
  misc_feature (1)...(239): n = A,T,C or G
gactgagaaatgtcaaggagatttttgggcagtantattatccatcaccacatcccttttaactgggactgcgagttcatccggctgcactttgggcacaaccgcaagaagcacctgaactatgtggaattcactcagttcctccaggaattgcaattggaacacgcaaggcaagcctttgcactgaaagacaagagcaaaagctggcatgaaagggaccttcaatttaaaacaaaaca

SEQ ID NO: 2432 - DNA, 309 bp, Homo sapiens
  misc_feature (1)...(309): n = A,T,C or G
agactgagagccgcgaaatgntntgccaccgccttggcntacgatagncttcttgntgnnatcnatgcaaacgtgaggatggttcatatacttacgtcagttgttggatcgaaatgtgaagtacaagtgaaaaacggaggcatatatgaaggagtttttaaaacatacagtcctaaggtaattcttactaagtattagttcttcctgtagcttcctgagagtgncttgtcattggtngngctgactgtggagttggcagttgagctcatgagataaaatacaaatgttttcctgattaacaaaaaaaaa

SEQ ID NO: 2433 - DNA, 548 bp, Homo sapiens
  misc_feature (1)...(548): n = A,T,C or G
gactgaggagccctggctgtggctggggggcngtgngccatgccnggggcngtgtaaggccccngntgnaagcaggcggaagacattagggatatttatgacttcagagatgttctgggcacgggtgccttctcagaagtgatcctggcagaggacaagaggactcanaaactggtggccatcaaatgcattgccaagaaagccctggagggcaaagaaggcagcatggagaacgagattgccgtcttacacaagatcaagcnccccaacattgtagccctggatgacatctatgagagtgggggccacctntacctcatcatgcagctggtttcaggtggagagctgtttgaccgaattgtggagaaaggattctacacggaacgggatgccagccgcctcatcttccaggtgctggatgctgtcaagtacctgcacgacctgggcnttgtgcaccgggatctcaagccagagaacctgctgtactacagtntggatgaagactccaaaatcatgatctctgactttggcctctccaagatggagga

SEQ ID NO: 2434 - DNA, 200 bp, Homo sapiens
  misc_feature (1)...(200): n = A,T,C or G
ggagaagctgaatggagtatttgaagatagctcaggacctggagatgtatggagcgaactactttacaatccggnttactattagaccactaaaaagaaggagaacatgnagaaaaagcaaagcacctgcnggagcngcctcaacgagctcaagacggagatcgaggccttgaaactcaaagagcgggagacggccttgg

SEQ ID NO: 2435 - DNA, 473 bp, Homo sapiens
  misc_feature (1)...(473): n = A,T,C or G
gaactgagtataagatggaccaaggcattgaccccaagtgagcacaaaataatgatgctctacaggaacttcacaaattatgctctgggaacgacagtcatactgggtgagaaggaattcagaaagttggtgagaagtgaatttccaaattttctccaggaagtacaagaaactcctttaagtatactattggatgaaccaaaggaccgcagctttgaagaggctttgaatgtgataggaagaatgggaatggtgtactacaagaagatgaacaacaatgcttttgaacgttagcatcatcacatcaatgtgcatggcattgaagagggtggacatagccatgtcaagagctcctaagcagttctgcccacctttcttctgtccaaccagtgcttcaaaaatttatccgncataggcactgaaattgnggatgtgtgtggaagctgcagngaaataaaatctttctccactcc

SEQ ID NO: 2436 - DNA, 301 bp, Homo sapiens
  misc_feature (1)...(301): n = A,T,C or G
cttggcccagctctcagccaccatttttcgaaaggaaggcctacaaggatggcctcagttcatgaaccttcttcagcacagcactcatagttcccatagccccgagaaagaggtgggacttctgctgctgagtgtggtggtgtcttcccagcccgaggcttttttagcccaccngcaccgagctgctcctgcttctgactcccaatctaggattacaagcttgtaccaccacactcagctancattangacttaaaanggaatacggaactgatcgattaggtgaatacatgaaacatatt

SEQ ID NO: 2437 - DNA, 317 bp, Homo sapiens
  misc_feature (1)...(317): n = A,T,C or G
ggaagccacccctgcaagctcntggcncgctgaacagtnggccgnactgtgcacatcgagctgagagaagcgcangagatcncanctgaancggtgntnagagcaacttgaggcagcagatgcccctgggagtntactgtanccgatacactacactangcntcctgcgccgggccagggtgcatatcnagaagctgnaggagcaggagcatcatgnccngcngntcatggaaangcttcncagcaancagannagcctgcagnaacagctggagcaantccaggggctgccaggagctnnggagcgagagcggttg

SEQ ID NO: 2438 - DNA, 441 bp, Homo sapiens
  misc_feature (1)...(441): n = A,T,C or G
gagactgagctctgtnggtggtgaggttggtacctggagcctacttggaatataagtctgctctattgaacgagtgtcacaagcaaggaggcttgagactggcacaagcaagggcactcatcaagatagacgtgaacaaaacccggaaaatctatgacttcctcatccgagaagggtacatcacgaaagcctgagactctgctccatagtgcaggccagcgtgaaggaatgtggtcagagggcaatgtacacattccggagacttgtgttggattcttgctgtgagaagaaggagagacactgggagtctaaggatgatgaccgctttcttctctgccctctgtaaagcgctgcttgctgntgtcaggatagtgcgtcagagtgtgtgttcgccaagttattattaaacaccagngggcatttgttcctagcagctcttgg

SEQ ID NO: 2439 - DNA, 217 bp, Homo sapiens
  misc_feature (1)...(217): n = A,T,C or G
aaagccaagatgcagganccaagagaacagactttaagtcaagtaaacaacccagatgccatctacaaggccctggtcacttactttagactgnggcatctcccatcttgtaagccttnntntccttggcgggcctccttcatctgtaactaaatggcacaaccntggaaactccttcccntagacaataaagctaagcctttagcttgtaaaaaaa

SEQ ID NO: 2440 - DNA, 191 bp, Homo sapiens
  misc_feature (1)...(191): n = A,T,C or G
ctctttttaaacacaccccgctccnttcagctggtcagacgatgagcctgagtatgagnattnncgngcctttaggcnttggagagctgntgctntgcantctnntgngcttttnctgttngcctnncctaattgtgncttggtggatgacaggccggagccgancanctgaaggcactcgctgggtcatg

SEQ ID NO: 2441 - DNA, 389 bp, Homo sapiens
  misc_feature (1)...(389): n = A,T,C or G
gcctcaggaatgtctcctgtctgtggngcantgagaacaaggcagcgnatggactacccagtgaggaaaatnntgccccctgcttctntntgtaaattagagtnccgctcgctgnggcngtatgctgnnnganctnttaggncttgatcatnaccatgtaaagncctggggggctctgtgctcctgggcatcactgngtgctgctgctactgctgccgccggaagaagagccggaagccagacaagagcgatgagcgggccatgagagagcaggaggagaggagagtgcggcaggaggaaaggagggcggaaatgaagtcangacatgatgaaatcaggaaaaaatacggnctgtttaaagaacaaaacccgtatgagaagttctaagg

SEQ ID NO: 2442 - DNA, 164 bp, Homo sapiens
  misc_feature (1)...(164): n = A,T,C or G
gtctggaggcttcttcctggcaggccgaagtatggtgtggtggccgatagnagcctctntctntgncannaacattggaagtggtcactttgnggggctggcaggcacaggagcagccgcaggcattgccatgggtggctttgaatggaacgccttggttttgg

SEQ ID NO: 2443 - DNA, 407 bp, Homo sapiens
  misc_feature (1)...(407): n = A,T,C or G
ttttgaggtggggtctttcacccttnncgtctgcaccagggtcagagactcgccactcccccaaacgtgaggaacaactccgggaaaaacatgtgaagaacctggagaacctgcagctggtggaaggtgtccaagagcaggtgaatgccngccctgctggactacacggtttgcaactacccacaacagactggagaaattcggacagctacttcttcggctacccgagatncgggnaatcaggangcaggcanaaagactactctgtactataagcacgtgaacggggatgtgccctataataacnctcctcatcagagatgctngcatgccanaagagcctaagtcccccacccctggaagccttgctctangaacacagtctgggaaggagatagaaggaggac

SEQ ID NO: 2444 - DNA, 211 bp, Homo sapiens
gactgagggtcgcatgttaaaacgggtcagctggccgccatcaaggttatggacgtcaccgaggatgaagaggaagaaatcaaactggagataaatatgctgaagaagtattctcatcatcgaaatattgccacgtactatggtgctttcattaagaagagccctccaggacatgatgaccaactctggagactgtccaaaaaaagaaaga

SEQ ID NO: 2445 - DNA, 260 bp, Homo sapiens
  misc_feature (1)...(260): n = A,T,C or G
gactgagcggcctttgacgacgcagtggagcacggntgatcaacgaggantacanantatggaagaagaacaccccttttctttatgatttggtgatgacccatagccctggagtggcccagcttaactgcccagtggcttccagatgtgaccaggngacacgantcttgaatatttttggaanttcatatattgtantttttntgccctccagacactnaggggggacnttatcagagcntatgagtactatttattgt

SEQ ID NO: 2446 - DNA, 134 bp, Homo sapiens
  misc_feature (1)...(134): n = A,T,C or G
ctgtgtgactgtacancgctgtggnggctgctgccctgaccatngcctggaatgtgtgcccactgggcaacaccaagtncgaatgcagatcctcatgatccantacccggagcagtcagctgggggagatgtcc

SEQ ID NO: 2447 - DNA, 282 bp, Homo sapiens
  misc_feature (1)...(282): n = A,T,C or G
tgagcgaggatctggatgagttacactaccaggccgtggactcagacctcctggagcagagagacaacagatgtaaggttaaatggacccacgaggaggtgagcctcgccgctgttctgcgggggactgaggaggagggggagtaacggccccaagggtggaggctggtcagccagctgccggtctgatgtctccatcagtgaaaaggctggttggccatctactgctccttacctcttcagancatgctcgggttctaaggtctgaggattgggggttatt

SEQ ID NO: 2448 - DNA, 351 bp, Homo sapiens
  misc_feature (1)...(351): n = A,T,C or G
accctggggtatgaactgtatgacgtgtgctcagagtcttccaatgtctatgccaccctgagggtgctcgcccagcaagggacaggccacctagagatgcagagagatcttcgcaaccactcctccaaggtggtggcactcattgggcctgataacactgaccacgctgtcaccactgctgccctgctgagcccttttntgatgcccctggtgctgggattactggccacaccgggttaaacctttcaccttctactgtaatgtgtcnaaacccctcatgcangtgacctnatcagcccctggctccgctgagcctctccagaanattcttnacttgaactgagatctact

SEQ ID NO: 2449 - DNA, 412 bp, Homo sapiens
  misc_feature (1)...(412): n = A,T,C or G
actgagatcgccggtcctcccaggnagncccttagcagcctggccttggaatggctagatcaggttcatgcactgattcatccagctaagatctgtggaaatccaggctgttcatcancagattctgagcaacaagntcctcattgtacgaaccanngaactgcagnggaagcgtggaggactgccggaggntttaccgaggagcatgaagngnnccnagtatctatcntcnacctgttgcctnctnggacgaccnncgacatttggaggnctattgttgggnccngccagagganttccagctcngctaganngcncncngatnccctccgcggaatttngggcctnattnacacccgnaannntacccatggatnanactccncggactgnccccccaaatagtattgca

SEQ ID NO: 2450 - DNA, 522 bp, Homo sapiens
  misc_feature (1)...(522): n = A,T,C or G
gactgaggtgaacagtatgaaagagctagncgccttcaagccaaaatgatgactaatttagttatggccaaggaccgtttacaacttctagagaagctgcaaccagttttgcaattttccaagtcacagacggactgtctataacgagagtactaacctgacatgccgcaatggacatctccagtcagaaagtggagcagttccaaagaggaaagaccccttaacacatgctagtanttgattgcctcgatcaaaaactgtcctgaaaagtggctccgcagggctctctggtcaccacagggcgcctagttgcagtggtttgtccatggtttctggagcaagaccgggacctggtcctgcagctaccacacataagggtactcctaaaccaaatagaaccaacaaaccttntactcccacaactgcagttcggaaaaagaaagacttgaaanattttaggaatgnggacagcaatcttgctaaccttataatgaatgaaatcgttngacaatgggacaggtg

SEQ ID NO: 2451 - DNA, 457 bp, Homo sapiens
  misc_feature (1)...(457): n = A,T,C or G
gactgaggtgtcggacgacactgaggncacagtaggatgtccgaagaatgaaatgagcagatggaactttgaaggctgagtcaacgggcagagggaatccggagatcgtcaatggcaggagaaagagcaaccagaagaccgagatgaatttcaacactatcctagaagagattcttattaaaaggtcccagcagaaaaagaagacatcacccttaaactacaaagagagactttttgtacttacaaaatccgtgttgagctactatgagggtcgagcggagaagaaatacagaaagggcgtcattgatatttccaaaatcaagtgtgtggagatagtgaagaacgatgatggtgtcattccctgtcaaaataaatttccattccaggntgcncatgaggctccnacgctttatatttttgcacctagnccacaaagcngggaccgatgggtgaagaa

SEQ ID NO: 2452 - DNA, 367 bp, Homo sapiens
  misc_feature (1)...(367): n = A,T,C or G
cagggtccccttacttgaggaaaggctgnnacgggtccgacgnntgtgtggaagctnntnnctcccttctgagctttnctagactccttacagcagcacggcacanannnttaggnttactaanatgganncacgcagaangatggntgctgctgnnacnctgngncctaacccacccctaaagcatgcagcctgatcgcggcgcagggtccgtgctcgtgctggagcanggaggctacaaggagaagtttgtgaagacggtggaagacaagtacaagngcgagaagtgccgcctggtgctgtgcaacccgaagcagacggagngtggccaccggntctgcnagagctgcatggccgcccctgctga

SEQ ID NO: 2453 - DNA, 518 bp, Homo sapiens
  misc_feature (1)...(518): n = A,T,C or G
gtcactgctgtgtgtatattagaagggtttcaaaatgagcagagcatgctgttagctgataaagttcttaaacttcttgggaaagagaatgccaaagaaaaatacaagaaccgtgaacctctgatgccatctccacagtttattaaatcttacttcagttctttcaccgatgatataatttctcaaccaatgcttaagggagagaagtctgatgaagataaagacaaggngggagaggctttagaagtgaaagaaaattctgggtatttgaaagctaaacaatatatggaagaagaanactntgacaaaatcataagtgaatgttcaaaggaantagatgctcanggcaaatacntggcagaagcattacttctgcgagccaccttctacctacttattggcagtgccaacgcggccaagcctgacttagataaggncatcnntttgacggangctaatgtgaagcttcgagcaaangcccttatcaggagaggcaccatgtgcatgcagcagcaaca

SEQ ID NO: 2454 - DNA, 477 bp, Homo sapiens
  misc_feature (1)...(477): n = A,T,C or G
gtacagaggttgtcagcaccattcacctccatgtgctgggtgttgcttaggacctgcagagcacaaagcagtgtgtccagcactccttgtcccagtccagaggcgaagagctcagaagcctcagaaggacttcagctccaggctagccactggaccgacttttcagcattttttaagaagtgcttcagttcctcaagagaaaccatcttctccagaggtggaggacccacctccctatctctcgggggatgaacttctaggaaggcagagaaaagtctacctcgagacctatggctgtcagatgaacgtgaacgacacagagatagcctggtccatcttacagaagagtggctaccttcggaccagcaacctccaagaggctgatgggatccttcttgtnacgngnnctatcanggagaaggccgagcanaccatctggaaccgcttacntnagctcaaagtcctgaagacaaagcg

SEQ ID NO: 2455 - DNA, 291 bp, Homo sapiens
gactgagattggtggatcctttaattcaagtaaaatggagaccgaacagccagaagaaaccttccccaacaccgaaaccaatggtgaatttggtaaacgccctgcagaagatatggaagaggagcaagcctttaaaagatctagaaatactgatgagatggttgaattgcgcattttgcttcagagcaagaatgctggagcagtgattggaaaaggaggcaagaatattaaggctctccgtacagactacaatgccagtgtttcagtcccagacagcagtggccccgagcg

SEQ ID NO: 2456 - DNA, 447 bp, Homo sapiens
  misc_feature (1)...(447): n = A,T,C or G
gactgaggtggggtctttcaagaaccttgtaggccctttgggctcgggtccagggcactccgaccaccatgcgcgacaggacccacgagttgaggcagggggataacatctcanacgatgaanatgaggttcgagtcncgctggtggtgcactcaggtgctgcccggttgggcagcccggacgacgagttcttccagaaggtgcagacaattcggcagactatggccaaactggagagtaaagtccgggagttggagaaacagcaggtcaccatcctggccacgcctcttcccgaggagagcatgaagcagggcctgcagaacctgcgagaggagatcaaacagctggggagagaggtccgggcgcagctaaaagccatagagccccagaaggaggaagctgatgagaattacaactcagtcaacacaaggatgaagaaaacccagg

SEQ ID NO: 2457 - DNA, 293 bp, Homo sapiens
  misc_feature (1)...(293): n = A,T,C or G
gactgaggtactacttcgtggggtccagagagagaggaggcactgcctccacgacagtaactttacagcacaatgcagagcatcaagngtgtggtggtgggcgatggggccgtaggcaagacgtgccttctcatctgctatacaactaacgccttccccaaggaatacatccccactgtgtttgacaattacagcgcccagagtgcggttgatgggcgcaccgtgaacctaaacctgggggacactgcgggccaggaggaatatgaccgcctccgcaccctttcctaccctca

SEQ ID NO: 2458 - DNA, 518 bp, Homo sapiens
  misc_feature (1)...(518): n = A,T,C or G
actgagagctaagatgcgagtgtgctggttggtgagacaggacagcaggcaccagcgaatcaaacttccccatttggaagctgttgtgattggtcgaagcccagagaccaagatcacagataagaaatgttcccgacagcaagtacagttgaaagcanagtgtancaagggatatgtcanagtacagnagatgggggtcaaccccaccagcattgactcgggcgtcatcggnaaggaccaagagaagaanctgntgcctggtcaggttctccacatggggaatggactttatccntacatcgtanagtttgaggaagtggcanagagccctaacctaacacagaggaagagaaagaggtcngactgtgatagtgagganatggaagctgagtctgggacagggctgncacctgggagcagccccagccngtgctntgtgtcccctannaaggacangaatgganccaccaaaaaggaatcactggnccactggagncnaggcttgaagatgtctatga

SEQ ID NO: 2459 - DNA, 536 bp, Homo sapiens
  misc_feature (1)...(536): n = A,T,C or G
gactgaggatgtatgacaacatgttccaccatgnngtncataaaggaagagaagctgncagaagctcactcangatgagatcntctctnngaccaagcaagagattcnggggctgtaagcnctgacagaatgancacaactncatcctgcacagtntgctggagactctgaagtgcttgangaangatgattagagcaaccngnnggaagagaaatccncnatgatnnntangtccctggngatgctggancttggcctnagccaggnccaggngatgatggccctgtccaatcacctgaatgctggggagtccaagaancnnaanctnctngctcangttcnacggctgtgccangagaaccagtggctgtggtatgagctggncaacacgcancagaagttgcacaaagagcgagcatncgtacggctgcagctggaggaggagaacaaacacctgnagttcatgaaccagcntgaagaagtacnnacnactacatctccccctnggntgnctacaacgcagatgaggccagcg

SEQ ID NO: 2460 - DNA, 301 bp, Homo sapiens
  misc_feature (1)...(301): n = A,T,C or G
cagcgatgacgacgacgatgtcactgtcactgtggaccgagaccgcttcatggatgaattctttgaacaggtggaagagatccggggctttattgacaagattgccgaaaacgtggaggaggtgaagcggaaacacagcgccatcctggcctccccgaaccccgatgagaanacaaanganganctgnngganctcatgnnggacnttnnnaanacagcgaacaangttcgctccaagctaaagagcattgaccagagcatccagcaggaggaaggtctgaaccgctcatcagccgacctg

SEQ ID NO: 2461 - DNA, 343 bp, Homo sapiens
  misc_feature (1)...(343): n = A,T,C or G
gaactgagatcgattatattttgctactttaaggaatagaccaaaaagcacaataaatatccactatttctccatcgacgaggagctggtctatgaaaatttctatgcagattttggacctctgaacttggcaatggtgtacagatactgctgtaagctaaacaagaaactaaaagacnncnggnatatgagctgaatgaaggcnctgcantcatggatctaagagaggcgcacancctngnggattccgaacgantctctatcnggattccttcatgggataattttnttaacgccctcangtgntgcttgnngatgctgttntgaggggatggaggaaggg

SEQ ID NO: 2462 - DNA, 317 bp, Homo sapiens
  misc_feature (1)...(317): n = A,T,C or G
ttctctctagcatccnagngcccatcatagtgcccatcatgatgctagccatcaaggaagctgnctcggacatgtcaccctacgttcggaaaacagctgctcatgccatccccaaactctacagnttggactccgatnagaaggaccagctgatagaagtcattgagaagcttttggcagataagaccacgctgggggcnggcagngtantgatggccttngaagaggnatgnccagatcgtattgacctgattcacaaaaactaccggaagctctgcaacctgctnantgangnggaggaggggggccctggggtg

SEQ ID NO: 2463 - DNA, 163 bp, Homo sapiens
gagactgaggaactctgagcaggagtcatggcagccaaacctaagctctactacttttatgccatcaagaagaaagatgaactggagcgtgtggccaagtctaaccgctgatttcccagctgctgcctaataaactgtgtcctttggaacaactaaaaaaaaa

SEQ ID NO: 2464 - DNA, 428 bp, Homo sapiens
  misc_feature (1)...(428): n = A,T,C or G
gactgagtggctctgaagcggatgttgaatttcaatgtgcctcatgttaaaaacagtactggagaaccagtatggaaggtactcatttatgacagatttggccaagatatcatctctcctctgctgtctgtgaaggagctgagagacatgggcatcactctgcatctccttttgcactcagaccgagatccgattccagatgttcctgcagtgtactttgtgatgccanccgaagaaantnttgacagactgtgccaggatcttcgaaatcagctctatgaatcctattatttaaattttatttctgcaatttcaagaagtaaactggaagacattgcgaatgcagcattggccgctagtgcagtcacacaagttgccaaggtttttgaccagtatctcaattttattactttggaagatgacatgtt

SEQ ID NO: 2465 - DNA, 475 bp, Homo sapiens
  misc_feature (1)...(475): n = A,T,C or G
cctccgtgctggtggtgtgtgttncagtgantgtntttgtgtgnacntnctgccaccagcnggcagagaagaagcacacgacccngncntacnagttcattcatatgctgannggcnttancatctacccatgagaccctcagcaacaagaagaanatcatcaaagttccgganagacaaagatggccctcggagggaaagtggacgagggaacctgttaataaacgcggagtctggcctgctgagccacgacaaggatcccagagggcctagccctgcatcttgtatggaccagttacccatcaaaaganactatggggaagaactgaggagccccatgacaagcctgacccctggtgagagcaaagccacctccccatnctcgccagaggaagacgtgntgttaggctctctnaccttctncggggacnacaactttcncaagaaagctctggtggngacaatccaagaggct

SEQ ID NO: 2466 - DNA, 175 bp, Homo sapiens
  misc_feature (1)...(175): n = A,T,C or G
acgaagttgaagagatgggancattctcantggccagngaggaagtcatgatgaacagagccgtganganngcaaagcgcntaaacgttggatttgaatctgatagcgggaggagcctttaaaggtttcaaaggtttggttgtgccttctggaggaggagggttttctggatttg

SEQ ID NO: 2467 - DNA, 423 bp, Homo sapiens
  misc_feature (1)...(423): n = A,T,C or G
cgaccccagaattactctcatnccgaaagagttaantcacgtanctgctnaaagnntctgataccctggaccctggggttatgtgaagcangggatgttanatnactganccgctctccggtacccgcagttcaaactcatcgcctgcctctctcagcgcnttgcttcactgctgccatgggaatcacctcccgcgcatccaaactgctgctgtggccagnggctccattcacggncgggctatccgccaggtgccaggatggntngccatnganggcattggggggctccctctctgcttcannnncttctggggccncagccctattcnnttcgacatcactaaactgactccagcttgtaccanaattgctttctttgnggctcttatnaaggcctgancccgggttctaagggacttca

SEQ ID NO: 2468 - DNA, 347 bp, Homo sapiens
  misc_feature (1)...(347): n = A,T,C or G
atctcaatctgaccaagnccccangacccacgccatngtgataagcanacctgcctggctctggggggcagaaatgggagccaatgaacatggggtatgcatagccaacgaagccatcaatgccagagaaccagctgctgagacggaagccttactgggaatggatctggtcaggctctggattngaacctntnacaacnnntagngaangngtnnnnggnattgtgtntttattggntgagcgcggacaaggtggnanttnttgtgaggatgcccactcctgccanagcttncaaagngcatatntgctgntggaccnagatgaancctggtttgctggagactgt

SEQ ID NO: 2469 - DNA, 285 bp, Homo sapiens
  misc_feature (1)...(285): n = A,T,C or G
tgagacgtatggcggggangaatcagaccggacggtttccctcccaggaattcaggccagnggccatgtacttgcttttggaaattgtacagacaatgacatgttggaagaagatgctgaagtctacgaacttcggtccaggggaaaggagaaggttcgaagaagccgcatcgagagatagacttgatgacattgttatattaaccaaagatatccaggaaggagacactctaaacgcagtagcccttcagtactgctgtacggtagcagatatcaaaagagtta

SEQ ID NO: 2470 - DNA, 466 bp, Homo sapiens
  misc_feature (1)...(466): n = A,T,C or G
actgaggcaagtgtcgnggcggaggataccagcagagccgcaagaacgacgatcggttaccgccggtagtaacaagcgcggaccggaagttccgcgtcttcgctgtccggggggagccgttaggcgcgcacgccggaagtggccaatcagccggtgtgaggcggtgcccactgtgttcgcgtccctcgggcagcanagccatggagcccggggctgctgagctttatgaccaggccctgttgggcatcctgcagcacgtgggcaatgtccaggactttctgcgcgtgctcttcggctttctctaccgcaagaccgacttctaccgcctgctgcgccacccttcggaccgcatgggcttcccgcccggggccgcacaggccctggngctgcaggtctttaaaacatttgatcacatggcccgccaggatgatgagaaaaggaagaaagaactagaagagaaaaaaaa

SEQ ID NO: 2471 - DNA, 509 bp, Homo sapiens
gactgaggtatcgatgttgaacaggtgtctgtcgtcatcaattttgacctccctgtggacaaggacgggaacccagacaatgaggacctacctgcaccgcattgggcgcactggccgctttggcaagaggggtctggcggtcaacatggtggacagcaagcacagcatgaatatcctcaacaggatccaggagcattttaataagaagatagaaagactggacacagatgatttggacgagattgagaaaatcgccaactgaggcgctcgcttctccatgggctggcgccaccctcagcgctccctgcctgggagtctagtgctttcatggcataggcctgacgggcccctcagagaccacgggctgagtagagactacctacctcattcggaattacgtttggacttgacaaatttgtgcaaatgatgagggatggtagaaatgtgtttacacaactttggaagattaggcatgaatacacagaaatttaccttttcaaaaaaaaaaa

SEQ ID NO: 2472 - DNA, 251 bp, Homo sapiens
  misc_feature (1)...(251): n = A,T,C or G
gacactgaggagaccatggctccaaaacgaaggcctctgtgcanactgagggctccaagaagcancgacaagggacagaggaggaggacagcttccggtccactgccgaggctctcagagcagcacctgctgataatcgggtcatccgtgtaggacccntnatgtccattnagccgnaaccccggnatacaggtccangangactatgactntaccctgaaccanaccancnttgtcaaggggggcaacta

SEQ ID NO: 2473 - DNA, 325 bp, Homo sapiens
  misc_feature (1)...(325): n = A,T,C or G
agaagactcttaaaaatatggaaaggactcttctactgcatgtgggtgcaggacgagccccttctgcaggangagatnnngaacattatttncnaagtcanacacanctgtatanaaggnngnggggttacaatctgttnatttaaacnttanggcnnaacatgnatcaagaggggcagngganagactnnctagagcgnggacangnactacatgctgttccgctctggtcctagaagcagnccttngannttctcaagcggaatgcctgggaagaangccaantcacactgtttttggacatcctgatgaaggagatcctgag

SEQ ID NO: 2474 - DNA, 487 bp, Homo sapiens
  misc_feature (1)...(487): n = A,T,C or G
gagactgaggtgccatggaactggttctgagcccgatcatctcagcagctccccagcaagatgngngcccaactcctgctacccctcctganactcctccgccccctgataaccctccgccaggggatgtgaagcnggtcgcagcctttgcccatccccagcagcaggaaacttcngagaagaggagttncaggcaacctctctggcttncatccccaaccccttccctgagctntgcagnccaccttcacagaaacccattcttggtcggttcctccggtgcaagggggnngcttcctcgagactccanccagcctctgagcggngaangngacagtgaggatggngcctgccggtctgnagaggtagacaacnggngccananatgganangtgaagcnaanatgctgntacaancgagctccccgccctgancgaatanannctggncattannngnaatncccaccccctacctaggcactgt

SEQ ID NO: 2475 - DNA, 340 bp, Homo sapiens; identical to SEQ ID NO: 74
  misc_feature (1)...(340): n = A,T,C or G

SEQ ID NO: 2476 - DNA, 235 bp, Homo sapiens
  misc_feature (1)...(235): n = A,T,C or G
gactgagaccttgatgggantnncagcaagattctcaaaangnnaacggatcgactgagangccactccagctgcaagagaggaactagacggggcgaaagaagaaacggagccaagacaagttcatcctgttcaaagctcaattttactagttacaacattcagtcaaaaaggaagtgggagggaaccccattcccaccaactggtctcgggatccagtaaaggggggggggga

SEQ ID NO: 2477 - DNA, 240 bp, Homo sapiens
  misc_feature (1)...(240): n = A,T,C or G
cttgcaggacctctcactgtacngacanggtatgcatnagtgggangangtcatgggtaacctggagattgtgcttacgggacacaatgctgatctttccttcctgcaatggatccgagaagtgacaggctatgtactggtggccatgaatgaatnctctgtactgcccttacctaacctccgagnggngcggggaacccaggtctacgatgggaagtttgccatctttgtcatgttgaa

SEQ ID NO: 2478 - DNA, 374 bp, Homo sapiens
  misc_feature (1)...(374): n = A,T,C or G
gaactgaggtacgtgccctggacttcctgaaccccaaccacgtacaatatgagttttctggggaccgtgatgtggagcatttcatccagctggctcatgagctgggactcctggtgatcctgaggcctgggccctacatctgtgcagagtgggacatggggggcttacctgcttggctactagagaaacaatctatcgttctccggtcttctgacccagantaccttgtagcttgtggataaatggctggcagtccttctgcccaagatgaagcccctgctctaccagaacgggaggacccgatcataacccgtgcagggnacctngagcctgancttgtgtgttgaaaggaggggaaagaccggggggggcaa

SEQ ID NO: 2479 - DNA, 447 bp, Homo sapiens
  misc_feature (1)...(447): n = A,T,C or G
gactgagttccccaggtgagaagagtgatgaccatccttttccttactatggttatttcatacttcggttgcatgaaggcggcgcccatgaaagaagtaaacgtccactggacaaggcaacttggcctacccaggtgtgcaggacccatgggactctgnagagcngtgaatgggcccagggcaggttcgagaggtctgacgacgacatcactggctgacacttttgagcacgtcatcgaagagctgctggatgaggaccagaaggttcggcccaacgaagaaaaccatanggacgcggacttgtacactttcccgggtgatgctcagcagtcaagtgcctttggagcctcctctactctttctgctggagggaaaacaaaaattacctgggatgccgcaaaccatgtctatgnggggtcgggggccactccgacccctgcccggccg

SEQ ID NO: 2480 - DNA, 176 bp, Homo sapiens
  misc_feature (1)...(176): n = A,T,C or G
ttgtcccaggtaaatcaccacgntgctgctagtaatgaaacctaccaggaacgcctggcacggctagaaggagataaagagtccctcatactacagggngagcgtcctcacagatcaagnggaagcccaaggagagaagattcgggaccttgaagngngnctggaaggccaccagg

SEQ ID NO: 2481 - DNA, 521 bp, Homo sapiens
  misc_feature (1)...(521): n = A,T,C or G
agactgaggtacatctccttcatggntgcgctagcagccaacggaacagtcaccatacagacatccgtaacaggagtgacagccgggaaaaggaaatttattgacgacagaagagaccaaccttttgacaagcggttgcgtttcagtgtgaggcagacagagagtgcctacagatacagagatattgtcgtcaggaagcaagatggcttcacccacatcttgttatccacaaaatcgtcagagaataactcactaaacccagaggtgatgaaagaagtgcagagcgccctgagcacagctgcagccgacgacagcaagctggttctgctcagcgccgtgggcagcgtcttctgctgtggtctggactttatttattttattcggcgcctcacagatgaccgaaagagagaaagcactaaaatggcagacgctatcagaaacttcgtgaatactttcattcagtttaagaagcctattattgtagctgttaatggcccagccattggactaggagcatcaaa

SEQ ID NO: 2482 - DNA, 184 bp, Homo sapiens; identical to SEQ ID NO: 75
  misc_feature (1)...(184): n = A,T,C or G

SEQ ID NO: 2483 - DNA, 510 bp, Homo sapiens
gactgagatctgaatgggatgtccttttgaggatgtgcagtgctcaatcataagtgtgacaaagactgacaagcaggaagcttatgtactcagtgagagtagcatgtttgtctccaagagacgtttcattttgaagacatgtggtaccaccctcttactgaaagcactggttcccctgttgaagcttgctagggattacagtgggtttgactcaattcaaagcttcttttattctcgtaagaatttcatgaagccttctcaccaagggtacccacaccggaatttccaggaagaaatcgagtttcttaatgcaattttcccaaatggagcagcatattgtatgggacgcatgaattctgactgctggtacttgtatactttggatttcccagagagccgagtaatcagtcagccagatcaaacactggaaattctgatgagtgagcttgacccagcagttatggaccagttctacatgaaagatggtgttactgcaaaggatgtcactcg

SEQ ID NO: 2484 - DNA, 519 bp, Homo sapiens
  misc_feature (1)...(519): n = A,T,C or G
gactgaggatgaaattctgaaagcagcggtaatgaaatatgggaaaaaccagtggtctaggattgcctcattgctgcataggaaatcggcaaagcagtgcaaagccagatggtacgaatggctggatccaagtattaaaaaaactgaatggtccagagaagaggaagaaaaactcttgcacctggccaagctgatgccaacgcagtggaggaccattgctccgatcataggaagaacagcagcccagtgcttggaacactatgagttcctcctggacaaaactgcccaaagggacaatgaagaagaaacaacagatgacccccgaaagcttaagcctggagagatagatccaaacccagagaccaagccagcccggcctgacccgatagacatggatgaggatgaacttgagatgctctccgaggctcgagcccgtctggccaatactcaaggaaagaaggctaaaaggaaagcaagagaaaagcagttggaanaagccaggcgccttgctgccctcca

SEQ ID NO: 2485 - DNA, 477 bp, Homo sapiens
  misc_feature (1)...(477): n = A,T,C or G
gactgagtgtgtaagctgctgagcatggtagctccaggaagcgttgagtcgaactggccgatcccgagaagtgctggagctgggtcaggtgctagacactggcaagaggaagagacacgtgccttacagcctctctgagacgcggctagaagaggctttggagaatttgtgcgagcggatcctggattacaatgttcatgctgaacgcaagggctcactaagatacgccaagggtcaaagtcagactatggcaacactgaaaggcctggtccagaagggagtgaaagtggatctgggaatccctttggagctgtgggacgagcccagtgtggaggtcacattcctcaagaagcantgtgagacgatgctggaggagtttgaagatgttgaaggggactggtacttccaccatcaggagcagncnctccaganttttntctgggagcgggatgtgcttncngcctctgaaactggttg

SEQ ID NO: 2486 - DNA, 508 bp, Homo sapiens
  misc_feature (1)...(508): n = A,T,C or G
gaactgagtttgcttgcctaaagtagcatttggagcagttcatacacctgagccctgctattctacagcgtcagattggaaagagtcagattttcaaataatggaagagcccaagacttctaaaaacgaaaatcatgaaccaaagaagaatattatttgtgaagaaagcaaagcagttaaaattatatctaatcaaaccttgaagcctagaaatgataagtcagaaattgggaccagctctctgaatagaaatagtagtaaaaaaaccaagcaaaatgatatttgtatagaaaaaacagaagctaaatcatgtaaagtaaacgctgccagtgttccaggccctaaagatttggggttagtacatcgagatcaaagtcattgcaaaatgaaaaagttnccaaattcncccatgaaagcccagaagggatcttcacagacaaatttagaaaagacncctagtttacagacaaaagcagaaaaagtnccnangtctccaaatttaccagta

SEQ ID NO: 2487 - DNA, 511 bp, Homo sapiens
gactgaggtgagcgcccctatcaatgcccgtactgtgaaaaaggtttcagtaaaaatgacggactgaagatgcacattcgtactcacaccagggagaagccctaccagtgctcagagtgcagcaaggccttcagccagaagcggggcctcgatgaacacaagaggacacacacaggagaaaagccttttcagtgtgacgtatgtgacttggcttttagcctgaagaaaatgcttattcgacacaagatgacacacaatcctaaccgtccgatggcagagtgccatttctgccataagaagtttacaagaaatgactacctcaaagtgcacatggacaacatccatggggtagctgacagctaagaggagcggcaaggaaccacaccatgtgaaagagcttctactatgaatcccagattcttctcacctgatcggcttaacagaaatagccacaaaggattcattgatctgacagtgtttatgtgcctatctttgtaatctatagatgcaa

SEQ ID NO: 2488 - DNA, 286 bp, Homo sapiens
  misc_feature (1)...(286): n = A,T,C or G
gactgagggcaaatgcaaacaatgcaaatgtacttcctgcaagcaaaagctgctgctcctgctgccccgagggctgtgcgaagtgctcccagggctgcatctgcaaagaggcttccgacaagtgcagcttgctgnncctgaaggggggcggaggggtncccacatctgtgtaaatagaccatgnagaagcctaaccttttttgtacaaccctgactcgttctccacaactttttctataaagcatgtaactgacaataaaagccgttgacttgattaaaaaaaaaa

SEQ ID NO: 2489 - DNA, 549 bp, Homo sapiens
  misc_feature (1)...(549): n = A,T,C or G
gactgagaaaagggagaanatggaggaagacaacaacctagtaagtacgaganaccaaaattaaagggaaaagtgggagattnttcactggtcgctactcccatccnnttcttgntcctgggtncnagatctcggncgntgtggaaactgtctacacccatgtgcttcatccngtatccgactcagataactcagtcagagaaacagttcgtcgtgtttgagggcaaccattatttctactctcnntatccaacaaagacccagaccatgcgagtgaaactggcgtcccgaaatgtggaaagctataccaagctggggaacccctcgagatctgaggacgtccttgattatgggccttttaaagacatccctgcctacagncaggacactttcnaagtacattacgagaacaatagccctttcctgaccatnaccagtantgacccgggtntgtcggggtatctcactggggcaatattgntgtggangagancgtggactttgaagcacacgggcgcagtgcngaaggggcctttctcccgctacgat

SEQ ID NO: 2490 - DNA, 535 bp, Homo sapiens
  misc_feature (1)...(535): n = A,T,C or G
actgagggctgaagactgggcctgggcagaggatatggcttttgtccccacgattgtaccttggcaaccggagtaccagatgcagaggctgcaggtgactcggaagctgctggagacagaggaggaggctgccttcccactggggggcgccaccccacgcgtacctgtacctggccagtaaccacagcaacaagtggggtcataggcggggctaccgcatccagatactcagctttgctggaaagcccttgccccaggaaagtcccatagagaaagccttcacctgggggaggtatcacttggctgtgacccagaggaaggaggaggagcctagcagctctagcatcttcaaccagaacgacccgtggacccccactgtgaacttcaccgacttcatcagcaatgagaccattgctggagaggacttggtagcctgggtgacggctggctttttgcacatccctcatgcagaagatatccccaacacggtgactgcggggaactcagngggcttcttcctccggccgtataactt

SEQ ID NO: 2491 - DNA, 152 bp, Homo sapiens
  misc_feature (1)...(152): n = A,T,C or G
tggacattgctcctccttntgaagacagcaacantcaggacaggtggggagtttncccctgncatcaggcatatgtttaaccanagcaatcacaactttggtggaccacctgataactttgcagtggggccggngaaccagtttgactatca

SEQ ID NO: 2492 - DNA, 374 bp, Homo sapiens
  misc_feature (1)...(374): n = A,T,C or G
agactgaggtggggtctttcaccggngacctttggaaggggacatgtctagccccaactccacaggcacacaggatcacctgttggggatgctggatgggctgggaggacctggagagagaggagaagcctgagcctgagtctgtgtatgagacagactgccgctgggatggttgcagccaggagttcgattcccaggagcagcttggtgcaccacatcaacagtgagcatatccactggggagcggaaggaattcgtgtgccattggggaggttgctccagggagctgaggcccttcaaggcccaatacatgctggtggtgcacatgcgcagacacacgggcgagaagccacacaagtgcacgaaaaaaaaaa

SEQ ID NO: 2493 - DNA, 527 bp, Homo sapiens
  misc_feature (1)...(527): n = A,T,C or G
actgagagagaaaggancaggtccgcaagctntttattggtggnttaagctttgnaaccacnnaagaangcttnagannctactatgagcaatgggganagctcacagactgtgnggttatgcggnatcctgcnngcannanatnaagaggatttggctttgtaactttctcatccatggccgangntgacgcgtgccatggctgcanggccccattccattgatggcagggtagttgagccaaaacgtgctgtagcaagagaggagtctggaaaaccaggagcccatgtgactgnnaanaanctgtttgntggtggaattaaggaagatactgaggaacaccaccttagagattactttgaagagtatggaaaaattgatactattgaaataattaccgataggcagtctggaaagaaaagaggctttggctttgttacttttgatgaccatgatcctgtggataaaattgtcttgcaaaaatatnactccataaatggtcataatgcanaaagttataaaggcat

SEQ ID NO: 2494 - DNA, 299 bp, Homo sapiens
  misc_feature (1)...(299): n = A,T,C or G
ttgaaagtagccatgtcganacccaggtttantcctcgagggacctttccacttcaaaggccacgagcacctaatcctcctgggatgaggcctccaggaccatttgtgaggcctggctctatgggtcttccaagattttacccagcagggagagcccgtggaattccacacagatttcctggccacggatcttatcagaacatgggaccacaaagaatgaatgttcaggtaactcaacaccgaaccgatccaagattaaccaaagaaaaattggatttttctgaagcacaaaaaaaaaa

SEQ ID NO: 2495 - DNA, 241 bp, Homo sapiens
  misc_feature (1)...(241): n = A,T,C or G
gagactgagaatatcttgctaatcatggccgattaaatgaatctgaagccaggagaaaattctggcaaattctgtctgctgttgattattgccatggccggaaggtagtgcacagagacctgaaggctgaaaatctcctgctggataacaacatgaatatcaaaatagcagatttccggcgtttggagatttctttaaaacttggtgatccaaacatgaggtnaaatttccattcccctaa

SEQ ID NO: 2496 - DNA, 334 bp, Homo sapiens
  misc_feature (1)...(334): n = A,T,C or G
gccatagagctgggcttanttgccagcgnggcngnccccatcncatactacnttcctgcgncntgnnagnganatgannaataaanaggnggannnattcacaccaanaacagagagcaagggcggtgaagaatgtggcaggagggcacctcgggacacgagcaccagaagcgactcgcggggcccggggccgccatggccgcgagcccttccagcgtgcggcctcggtactccccgcctccctcctcaatttccgcctccttgcggcggtctcccctggcaacagcggaagactggcctctcctcaagcaccgccccatgggggggtgggggg

SEQ ID NO: 2497 - DNA, 286 bp, Homo sapiens
  misc_feature (1)...(286): n = A,T,C or G
ttttgagggcccaaagacacacatttgtctggatgnnccatagtngatacatttaatcatttaattcctactgaacacttagatgatgccctatttctaggatccaacctggagaatgaagtctgtgaggattttagnacaagtcaaaatgtcttagaggactcgcctgaagaacatgctcagcgataaggatcctatgctaggatctgcaagtaaccagttctgtttttntgttttggatagcaatgatcccaatttccagatgccttgttcaacaggtgatggt

SEQ ID NO: 2498 - DNA, 465 bp, Homo sapiens
tctgagcagacaatcctcaatatgatttctcagacctcttcagacacaactatcgcaggattaatgagcatgtcaacctgcgtctacaagtgcagtgccttccctgccttcctctgaggagtcatcgagcagtctaactagtgtggatatgttgcagggcgagcggtggctgtcttcccaacctccgtttaaactcgaagctgcccagggtcatcggactagtgagagtttagcacttattggcgttgatcattccttgcaacaggatggttccagtgcgtttggttcccagaagcaggcgagcaagagtgtgccatctgctaaggtttcacttaaggagtaccgtgcaaagcacgcggaagagttggctgctcagaagaggcagctggagaacatggaggccaatgtgaagtcacagtatgcgtatgctgcccagaatctcctgtctcacgacagccattcttc

SEQ ID NO: 2499 - DNA, 210 bp, Homo sapiens
  misc_feature (1)...(210): n = A,T,C or G
ggcaatataactatccatccacaggaccgcagactaaccattttcctcatgtagctccaccaactctacctgggaatccaaatttaacagnggatcatcaatatgtttcttctggagaccctgcacttcaaaccagcttcaaaaagccaggtactcatgaagggatgnttgaaaatgttgaaatggaaagctagcttctttacattagga

SEQ ID NO: 2500 - DNA, 163 bp, Homo sapiens
  misc_feature (1)...(163): n = A,T,C or G
aggcattcatggctgaagtggaggatcaggctgctagagacatgaagagacttgaagaaaaggacaaggaaagaaaaaacgtcnagggtattcgagatgacattgaagaggaanatgaccangaagcttattttcgatacatggcagagaacccacctgctgg

SEQ ID NO: 2501 - DNA, 158 bp, Homo sapiens
  misc_feature (1)...(158): n = A,T,C or G
actgaggctctgatattggaaagccaataggttttgatgttttgtgtggcgcctcctgaattaacaaaccaagatgaacataaccaaaggaggcctnggnttgttttcancaaattccaattcatcatgtatggagctttcaaagaaaacttgcctga

SEQ ID NO: 2502 - DNA, 259 bp, Homo sapiens
  misc_feature (1)...(259): n = A,T,C or G
gtccctgtgccgagagatccagctgcacccgcctggccatggcactgtgtctgaaacaggtgtttgcgaaggacaagactttccggccccggaagcngcttcgagcctggcacacagcngctttgagctatataagaaggcacaagcttcacctcaagtccggcctggaccttcggagtgtggtgaggctgccgcctggggagagcatcgatgactggatcgctgtgcatgtggtggacttcttcaaccgtatcaacct

SEQ ID NO: 2503 - DNA, 550 bp, Homo sapiens
  misc_feature (1)...(550): n = A,T,C or G
actgaggtgaagatggagctgggnaagnnaagcctcataagaagaattcagggcatagaggagtacaagaagggaagaggactggagtacctgtacttaaatgtgcacgacgaagacagggatgatcaaacaagatgtaatgtatggatcttagatggagatctgtaccacaaagggctactcaagttctctctggatgccctttctntgagggacactctggtcatgttggttgttgatatgtcaaagccttggactgctttggattccttacagaaatgggcaagtgtggtgagagaacatgtcgacaagctgaaaatcccccctgaagagatgaaggaaatggagcagaagtgngagnggccntaanatgctaatgtgggctcccattnaaatatcttagcnggctataaaaancaaacatgntaangngggcttccattgnganatcttagctgactataaaagccattccaattgttttctctncaaacnnngattacngagggaaatacaatgtgactaccattttgaaatttaatttgaatgg

SEQ ID NO: 2504 - DNA, 207 bp, Homo sapiens
  misc_feature (1)...(207): n = A,T,C or G
cagatcaaggtagcgaagttctcctacatgtggaccatcactaacctttagtttttgccgggaggaaatgggtgaagtcataaaaagttcaactttttcatcaggagccaatgataaactgaaatggtgagnntgancacctctaggtgnaancttttnntataagaagcctgntttgcttggttngaataggatatggatagaatg

SEQ ID NO: 2505 - DNA, 323 bp, Homo sapiens
  misc_feature (1)...(323): n = A,T,C or G
gactgagagcctttttctggctggtctccctgctcttggcttctgnggtctggttcatcttggtccatgtgacagaccgatcagatgcacggctccagtatggcctcctgatttttggtgctgctgtctctgtccttctacaggaagtgttccgttttgcttactacaagcctccttaagaaggcagatgagggcttagcatcactgagtgaggacggaagatcacccatctccatccgacaganggcctatgtttntggtctgtccttnggtatcatcagtggtgtcttctctgttatcaatattttggctgatgcacttgt

SEQ ID NO: 2506 - DNA, 155 bp, Homo sapiens
  misc_feature (1)...(155): n = A,T,C or G
atgactgaggctccaggaacctgtcacaggcaggctncangattanngaagtgtagctgagcgcaagagcctccttatcagagtctctgttcagaggacccaggctccagctgtggctaccacataagggnttttatatgagaaaaataaaagaa

SEQ ID NO: 2507 - DNA, 313 bp, Homo sapiens
  misc_feature (1)...(313): n = A,T,C or G
atatcagatcaaatcacacgatttatatcagnagnatnaatgnccntacgtannnnngatgacntgtnngcgccctgtcngccccttttttctccntttggcnacgtggtagacnattgtggctttaaagancatgaagatgangggacaggcttttgttatatttaaggaactgggttcatccacaaatgctttgagacagttacaaggatttccattttatggtaaaccaatgagaattcagtacgcaaaaacagattctgatataatatctaaaatgcgtggtactttcgctgacaaggaaaagaaaaaa

SEQ ID NO: 2508 - DNA, 541 bp, Homo sapiens
  misc_feature (1)...(541): n = A,T,C or G
actgaggcatagtgcaaggaatgtcatctgtgaccgtaccgncacgccgctggcacgccttccgcatgatgtcagcggcccactactacccgaagctcatgagcatcatgggcaacgtgctgcgcttcctcccagccttcgtacgcatgaagcagcatgattgaggagggctacgtgggcgagcttgctggtgtgcgaggtgcaggtgcacagcggtagtctgctgggcaagaagtacaactggagctgcgacgacctgatgggtggnggcggcctgcactccgtgggcacctacatcatcgacctgctcaccttcctcacgggccagaaggctgtcaaggtccacggnctgctcaagacctttgtcaagcanacggaccacatcaagggcatccgtcagatcaccagtgatgacttctgcaccttccagatggtgctggagggtggagtgtgctgcaccgttaccctgaacttcaatgtgcctggagagttcaagcaggacgtgaccgtggtgggctccgntgggcggctcctggcggta

SEQ ID NO: 2509 - DNA, 508 bp, Homo sapiens
  misc_feature (1)...(508): n = A,T,C or G
agactgaggacagaatttggctgtgaccgagtgaagctgctggagagtgtagtggttggagacattgcggaactaaggcctaaccagggaacactctntttgtttaccancgaagctggaggcatcttagacgacttgattgtaagcaataccttctgaggggcaccgtgtatgnagtatccaatgcttggcatgccgggacaaggacttgnctctnatgcaggacnnggtcaaggagtncccnaacaggtctcntgnangtaagcctgnnggtggtanagaangccctganagctttgcnaggacccacggcanctcaggngntacaggctgggntgacaagggatatgangaaactaccctncatnacnngcgctgggatggaggtgntctgggtgtttggctgtnaagtgacccnntgtgtntanacagganaaganggngtnntnaaattgntcccagcaanaggggcntttccacttgggaactncctctggctgaaaaatcc

SEQ ID NO: 2510 - DNA, 180 bp, Homo sapiens
  misc_feature (1)...(180): n = A,T,C or G
ggatcccccgttctgggatgaagaccagcatngcctgtaccagcatancaaagctggngcctatgattgnccatcaccagaatgggacaccgtctaccccagtaagccaaggatcttgatcaataagatgctgaccatcaacccgtccaaacgcatnacgggcgggtgaggctctcaagc

SEQ ID NO: 2511 - DNA, 264 bp, Homo sapiens
  misc_feature (1)...(264): n = A,T,C or G
gagagccacggcagtgaaanggcggtctctgaccctcggctctcganctanagtgcacggncaganttctactgcctcgtgtctgaggangangtgtagcccatatcccagcagcccagaccatganancactggtggcagcttccagggtagaggcagcaggcactccttcctaggatcacaacccttgcctctatccctgggcccctcaggaaaggagtgtggccccagggtgtcacaaaataaaatcctgttggttcctga

SEQ ID NO: 2512 - DNA, 389 bp, Homo sapiens
gactgagtttagatgcaaaatctacaaatattcaagtggttgttaaggaaggtggcctgaagctaattcagatccaagacaatggcacttggaatcaggaaggaagatctggatattgtgtgtgagaggttcactacgagtaaactgcagacttttgaggatttagccagtatttctacctatggctttcgtggtgaggtaagttagacttacagaaatgtttagcaatgccctcctgtgataatgttctcatttctcaacagaggcaaatgcaattcaatactttgtacttgctcaccacatgcaaatttgaacaaatttagctttccgtgactgagaaattctgaaaaatacttaatatactattttatctacagtggcactgaaaa

SEQ ID NO: 2513 - DNA, 229 bp, Homo sapiens
  misc_feature (1)...(229): n = A,T,C or G
gactgaggcacgtgctctaacacctcaaactgcggaaacagatgccattcgcttcttggttgggacgcagtctcttaaatatgataatcagatccacatcatagactttgatgacgaanataacattataaataaaaatgtcctcctccatcaagcgggtgagatctggcacatcantgccagcccaggcagataaaggtgtgctggccacctgctacaacaaaaaaaa

SEQ ID NO: 2514 - DNA, 166 bp, Homo sapiens
  misc_feature (1)...(166): n = A,T,C or G
caccaacaagctgtgtgtgcgaggagatcgccattatncccagcaagaagcttgggaacaagatagtcggntacntcacacatctgacngaagcggattcagagagggtcctgtgagagggcagctctatcacgttgcnggaagacngagagagagaggagagata

SEQ ID NO: 2515 - DNA, 540 bp, Homo sapiens
  misc_feature (1)...(540): n = A,T,C or G
gactgaggtggggtctttcacacctacctggncacggccaaaggcgcggtagagaccttcatgaagctccgtgcccgggaccctgccagcagaggagacaggtatatgctggtcactttcgaagagccgccctatgctatcaaggcttggatggaaagaaaaccatgcancgtttatgaatgaactgaaaaaccttcaggcagaaggacgttacgactcttggccaatccctaaggacagnttttgatttgttaaatttaaatagattagtaactggcatagacaactatgggcaggtnggttgaatactaaggnagaaaagagttgnttttatttttgtgtacaaanccncaatccagtccanaagcttgtaccatggaatgnangtataaaacattggaggttgaanaacaaacnacanagggntgaccntgnacntgnntnatnganggntatanntgnggagnctgntgnnggntgggananntggagttcaaatcaagaaggccttggntgtaaagtgagacacacatttggctt

SEQ ID NO: 2516 - DNA, 547 bp, Homo sapiens
  misc_feature (1)...(547): n = A,T,C or G
gactgaggcccaggatgctctggtacaagcananggaagtggtcaaacaaggantgagccatggcgaactctccagtgaagcttacaaccaggtgtgggaggaatgctacagtcaagtcctctatcttcctgctcagagccgctacactcgtgctaatcttgctagcaaaaaggacagaattgaatcacttgaaaagagacttgagataaacaggggtcacatgacaacagaagccaagagngctgcaaagatggaaaagaagatgaagattttgcttggnggttaccagtctcgtgctatggggctcatgaagcagttgaatgacttatgggaccagattgagcaggctcacttggagctacgcacttttgaagaactcaagaaacatgaagacnttgctattccccgnaggctagagtgtctaaaagaagatgtgcagcggcaacagggaaccgagagaaagagcttcagcagagatacgcggatttgctgatgggagaaagagactttacagggcaaagttctgaagcacagtgggatgctctg

SEQ ID NO: 2517 - DNA, 416 bp, Homo sapiens
  misc_feature (1)...(416): n = A,T,C or G
cagtgacatctcattgtatgnggcttgnggacctcacncaggaggaatggcngcanntgaatnctgctcanagggctttgtaccgagatgtgatgctgnagacctacagcancctagtaaccgtgggttgtcangtcaccaaaccagatgtgatcttcaagttggaacangcanaggagccatggtgtacctggnggaagagatgttttggagacgctctnttttaagccgcangaggaagaatgaagagttttgcctttaaggacatggccaaggatctgaggttcgaggatgtggtcatttacttctctctggaggagtgggagtgcttgcgccattcccacaggaatctgtaccgagctgtgatgttgnataactacagcaaccctgctggcactgagtcttgctgatactaa

SEQ ID NO: 2518 - DNA, 152 bp, Homo sapiens
tactgtgcaagcttgaagatctggaaccagtctctaacaagcaaaactacaagtttatacagggtgacatttgtgattctcactttgtgaagttgctgtttgaagtggagaaaatagatatagtactgcactttgctgcacagaaaaaaaaa

SEQ ID NO: 2519 - DNA, 522 bp, Homo sapiens
  misc_feature (1)...(522): n = A,T,C or G
gactgaggagtatctctttacccccccagnaactactcaatgctgaagcccttcaaagtgatagcggagactttggaagcaccatggatgggttttgtgatcagcaagtcccttttatggtcccagggaaatctcgatcagaggactgtcgagggcgacctttgattgacagaaagaggaagtttgtggacacagatctggctcacgattctgaagagttgtttcaggatcttagccagctgcaggaggcttggttagctgaagcacaagttcctgatgatgagcagtttgtcccagattttcagtctgataactggtctcttgaagctataantgangcattttgntancnnananccagagnnanccgnttgntgttgtccgctctggcctatgagncaagaggttcgagatttgncgnctgtacccaaggnggctnctctcttttttgagaccancngtaaggaatagaanngagnanncnttaataccnatgggctttcttgtaaaatctggggttgc

SEQ ID NO: 2520 - DNA, 187 bp, Homo sapiens
  misc_feature (1)...(187): n = A,T,C or G
gactgagattctcattgaaatctgttaattctattttttgaacacttatgantaaccacgtatcttcaacaccatcaaccatgangctanaacaaaccatcaaccccatacttttatatttcatacattttataatatcangtctatactattttaacntacntcncattttattttttgtgtgagt

SEQ ID NO: 2521 - DNA, 551 bp, Homo sapiens
  misc_feature (1)...(551): n = A,T,C or G
gagactgagggttattntgcgctttgntgccagggacnacgcanctgcgcgccctgcactntgacnagtttgngtgtaggtccnacnngctccgtgactanctgcctgatgtccnagctgtgcngctgaaagcccnnagaactgangcgncgaccacaggttttagtataaaggcagtgccattccagaatgccgttttgaatgtaaaagaacttggaggagctgacaatatccggaaatactggagccgctactaccaaggatctcaaggggtcatattcgtattagacagtgcctcttcagaggatgacttagaaactgctaggaacgaactgcactccgctctccagcacccacagctatgcactttaccctttttgatattggccaatcatcaagacaagccagcagctcgctcagtacaagagatcaaaaagtattttgaacttgaaccactggcccgtggaaagcgctggatcctgcagccctgctctntggatgatgtggacacactgaaggacagcttctcccngctcataaacttgttagaa

SEQ ID NO: 2522 - DNA, 307 bp, Homo sapiens
ctcaccagagagcagtgggtccccagaacccaagagaccagcagcttccgaggctgcttcgggaagccaggagcgcctggacttcaaccgcaacttacaggaggttgtgccagccattgagaagctgctgtccagtgactggaaggagaggtttctgggaagaagcaatgtggaagctaaggatgtcaaagggacccaagagagcctggctgagaaggaactccagcttttggtcatgatccatcagctctctgcccttcgggaccagctccttacggcccactctgagtttttttttttttttaaa

SEQ ID NO: 2523 - DNA, 334 bp, Homo sapiens
  misc_feature (1)...(334): n = A,T,C or G
actgaggggccatgggacatacatgggggaagagaagctcattgcgtctgtggccggctctgtggagagagtgaacaaactgatctgtgtcaaagccttgaaaaccagatacaatggagaggtcggagacattgtactggggagaatcacagaggttcaacanaagaggtggaaggnagagaccaattccaggctggactccgncttgctcctctcatccatgaacctacctgggggagngctgnggagaaggtctgcggaggatgagctggccatgagaggcttcttgcannaaggcgacctcatcagtgcanccngcccctcatttgtctct

SEQ ID NO: 2524 - DNA, 231 bp, Homo sapiens
  misc_feature (1)...(231): n = A,T,C or G
gcctgagagccctgcacgctatagcaacaaggagctgaagggaatgctggtgtggtcccccaaccactgtgtatcagatgccaaacttgacaagtactttgcaatggccaaggagaagcatggatataacattgagcaggcactcggcatgcntntgtggnataancacgntgtggagaanncgctggntgacctagccaacttnacnccctangtttggagagggaaggg

SEQ ID NO: 2525 - DNA, 421 bp, Homo sapiens
  misc_feature (1)...(421): n = A,T,C or G
tcacacagggagtcctgaggtgccttcatagangcctgcngcacattgtagaaaacagtcaggtcatctgngaggtgngggccagcaaatcttgaggaagagatgccggaagatccgtgagattgtcctcagctacagctatatcgctatggacacagagttcccaggagtnggnggnccggcccgatctggtgaatttngaagctccntagnattaccaggcatcagccttntgcgggngcaatgttgatcttcttaaaatcatacagntggggcttaccggttaccaacgagaaggggggaggaccngtctggaatnaacncacggcagnttcaacttnaaggntcaaccctgncngaggagatgnactcccaggantccatagatctgcttgcaaactcanggcctgcagttccagaa

SEQ ID NO: 2526 - DNA, 145 bp, Homo sapiens
gactgagatggtttcaccccaacatcactggtgtggaggcagagaatctcctgctgaccagaggagtcgatggcagttttttagcaaggcccagtaagagtaaccctggagacttcactctgtctgttagaaaaaatggaactga

SEQ ID NO: 2527 - DNA, 233 bp, Homo sapiens
  misc_feature (1)...(233): n = A,T,C or G
tggcctacttcacattntgcctgnggataatccccgtttgctttnttcgnngtcactttcggctggggagaatgncctgcccttcaccatgcagccaggcgaagacgngggctccaattacttcaccaaaggcaagcgagggaagcgcttaangcattcctgggtggcttnttcttnattaaaagaggccatcctacccaggcgggganaanaaaatactgacccttttggga

SEQ ID NO: 2528 - DNA, 328 bp, Homo sapiens
  misc_feature (1)...(328): n = A,T,C or G
gactgagatggcaggagaactggctgacaaaaaggaccgagacgcatcacccaaggaggaaaggaagcgatcacggactcctgagagagatctgctgatagagaccgggaccggaagtcctccccatctaaagataggaagcggcatcgctcactgggataggctgtagaggagggagccgttctcgctctcggtcccgttccaagtctgtagagaggtaangggnctttttgtgtgncactctanggggggangnngctnggcnctntgntgtgntgnncnanagngattatatncttgagtgcccngagnggacggaaatatacgg

SEQ ID NO: 2529 - DNA, 129 bp, Homo sapiens
  misc_feature (1)...(129): n = A,T,C or G
ggtggaagtaacgctgnttcaggtgttnttnagaggcccgaaggaacttcatggccaccaggcggaancccttctgctcgaatcattngatgatctcgcccaccaggccgngctgcacgccatctggct

SEQ ID NO: 2530 - DNA, 463 bp, Homo sapiens
  misc_feature (1)...(463): n = A,T,C or G
gactgagtatccgagttccaggaggaaggaatgaacgccatcaacctgcctcttagccccatctccttcgagctggaccccgaggacactctgctggaggagaatgaggtccggacaatggtcgatccaaactcacgcaatgaccccaaacttcaagagctgatgaaggtgcttcatcgactggatcaatgacgtattggtgggagaaagaatcatcgtgaaggacctcgctgaagatctctatgatggccaagtcctacagaagctcttcgagaaactggagagtgagaagctcaacgtggccgaggttacgcagtcggagatcgcccagaaacagaagctacagactgtgctggagaagatcaatgagaccctgaagcttcctcccaggagcatcaagtggaacgtggactgtgantntgcnaagnannngngtgcnatgctnctagtgctggggggtctg

SEQ ID NO: 2531 - DNA, 548 bp, Homo sapiens
  misc_feature (1)...(548): n = A,T,C or G
gactgaggggaaaagcctttcaaatgtgaatttgacggttgtgataggaagtttgccaatagcagcgatcgaaagaaacactcccatgtccacaccagcgacaagccctactactgtaagattcgaggctgtgataaatcgtacacccacccaagctctctgaggaagcacatgaagattcactgcaagtcccccccaccttcgcctggagctcttggctactcgtcggtggggactcccgtgggtgaccctttgtcccctgtgctggacccaaccaggagtcgatccagcactctgtcccctcaggtgaccaacctcaatgagtggtatgtttgccaggccagtggggcccccagccatctccacacaccttccagcaatggaaccacctntgagtctgaagatgaggaaatgtatgggaaccctgaagtcatgcggacgatacattagaattattattaataagtgaggtagtaagtggcagtccttggaccatgtcctaacctgaaacaatgctgagcctgagacaaactggtgactcagacttg

SEQ ID NO: 2532 - DNA, 316 bp, Homo sapiens
  misc_feature (1)...(316): n = A,T,C or G
gactgagaggactgattatagtgagtaagtaacctcagctacatcatctgagcccgtccctaacagctgactgccaacaccgtatttacagatccgaacatntcacgctgcccccggggaactgtgggttcnagcactccgggcccacctcgaaggactgggcccttcagtttacacatcagaccaaaaagcaacctcgcagaatgaaacgggnaagatctacactctatgaagtactgtggagctttacctggtggctgattatgcagaggtaaggggtnagcaatggatttcagcaaacagaaaacaaaacaaa

SEQ ID NO: 2533 - DNA, 535 bp, Homo sapiens; identical to SEQ ID NO: 76
  misc_feature (1)...(535): n = A,T,C or G

SEQ ID NO: 2534 - DNA, 290 bp, Homo sapiens
  misc_feature (1)...(290): n = A,T,C or G
gactgaggagcacgatgccgtttctgggtcagggctggaggtcccctggatggagctggattaaaaccgaggatgggtggaaaaggtgtgacccctgtngccacgagctcaggagcgaggatagccagtacaccatcaaccacagcattatcttaaatagtggtgaagaagaaatattcaacaatgagtgtgaatactgcagccanaaagaggaagaaggaacattttggaaatgacacagctgctcacagtttttatcgtgaaaaatggatctacgtccataagaaaaa

SEQ ID NO: 2535 - DNA, 540 bp, Homo sapiens
  misc_feature (1)...(540): n = A,T,C or G
actgaggaaggacatgaggatccnttggcagcccattcaagaggacgatggtaaggagccatttantagtaaatagagtgaaaagnncaggctgccacactggggcctgaaggttggcagtggaaaagcctgctgggctgtgatctctcactccaaagtcccaagtgcctttttgcttcctgcaaaaggaaggaagccaaggaggagaccatgtccatcgccctgaagcaagtgttcaacaaggacaagaccttcaggcccaagaggaagtttgaacccggcacacagagatttgagctgcacaaacgggctcaggcgtccctcaactcgggtgtggacctgagggcagccgtgcagttacccaacggggaggaccagaacgactgggtggctgtgcacgtggtggacttcttcaatcgcattaacctcatctacggcaccatctgtgagttctgcactgagcggacctgtcctgtgatgtcagggggccccaaatacgagtaccgatggcaggatgacctcaagtataagaaaccaact

SEQ ID NO: 2536 - DNA, 391 bp, Homo sapiens
  misc_feature (1)...(391): n = A,T,C or G
gactgaggtggacagtgggcnncngaaagaagtgaaagaaaaagaccgagctaaaagcaaatggcagccagttccacagttgttgaagatatcacaaaggacgagcaggaggaaacaccggaaataatcgaacagatccctgcttcagagagcaatgtggaagaaatggcgcaggctgctgagtcccaagctaatgacgtcggctttcaagaaggtatttaaatttgttggttttaaattcanggtgaagaaggataaaaactgaaaagtcagataccgtccagctactcactgtcaagaaggatgaangcgaaggggcagaagcctccgtcggagcaggagaccaccaagagcccggagtggagaccgtcggcgaatcagcatccaaaga

SEQ ID NO: 2537 - DNA, 389 bp, Homo sapiens
gactgagctgatacaagtgaactcaatgatggctatgactggggtcgtctgaatcttcagtctgtgacagagcagagctccctggaggactttcttgcaactgcagaacttgcagggaccgagtttgtggctgagaagctgaatattaagtttgtaccccctgaggctagaaccggactgctgtcttttgaggagagccagagaattaagaaactccacgaagaaaacagacagttcttgtgtataccaaggaggccaaattgggacagaaaaactagcccagaagaactgaaacaagcagagaaagataacttcctgaaatggaggcgccagcttgtgcggctagaagaggaacagaagttgatattgactccctttgaacggaactg

SEQ ID NO: 2538 - DNA, 360 bp, Homo sapiens
actgagcccggatctgcttcttgcctggaccccatttgtttgggattagtggaaggtgtaattgggaaaattcaacttcattcagatcttccatggtggcttattttaattcggcagaaagcgttggtaggcaaactcccaggagaccatgaggtctgtaaagtcaccaagattgctgtattgtcactttctgaaatggaacctcaggagcttgagctggagctctgtaagaagcatcattttggaattaacaagcctgagaagattataccatctcctgacgactccaagtttctactgaagacatttacaaatatcaaatccaacgtgtctgctcccaacaaaaagaaagttaaaaag

SEQ ID NO: 2539 - DNA, 237 bp, Homo sapiens
  misc_feature (1)...(237): n = A,T,C or G
atttggaacccgccgcaaagagtcctacaatgtcnagatggaggttnccagttagggtgggcttntgccgaggggaagcngacgacctgaanagagaagcactgtatttcaccctgactaacaccnagcnntctgtgaagaatctctaccagctaagcaacctggngattcctggagtgtgggcttttcacatcgncagcaggtttgccctggacaatgnccgtccagccacagttg

SEQ ID NO: 2540 - DNA, 166 bp, Homo sapiens
  misc_feature (1)...(166): n = A,T,C or G
aaacaactgtactcgggactggcgcgttcccnggttgtngccgtttggttcctgtcctgcctgccttcaatgntgancaatgangtgagtctttgcttcattggcgctnatgatgaataaaggaaacaggatagaaaagaggcagccacctgtttaaaaaaaaaaa

SEQ ID NO: 2541 - DNA, 321 bp, Homo sapiens
  misc_feature (1)...(321): n = A,T,C or G
accagaagtacaatttcttcacatttcttcctggggngntgttcanccngtncagatacttcttcaacattctacttcctgcttatctgcctgcatcgcagttcgtcccagagatgaggcttggngccctgtacacctactgcagttcctctggacttcgtgctgtttgtcaccatcatccgtgaggcantaaagnaganccnatgntatgtncgtgacanngntatganctcccaggcntacatccgactcacgtcncgaggnaccgtnaaggtgaagagttttaaacatccaggnggganacctcatccttggggaaaa

SEQ ID NO: 2542 - DNA, 433 bp, Homo sapiens
gggcatggcatccctccaggagctccaagaccctgctcccggggaggaggaaggactcatgattgtgaaggtggaagactgctcctgggaacaggagcctgtccagccggtggacagccgggattccgaagcctgccgccagcggttccgacagttctgcttcagggatgcgggtggaccacacgaagccttcagccagctgtgggagctctgttgccgctggctgcggcctgagctgcacagcaaggagcagatcctggaattgctggtgctggagcagttcctggctgtgctaccaggggagatccaagcccagcttcagagacagcaccttgggagcggtgaggaagctgtcgctttggtggaagacatacagaatcagtcgttgaaagcctggccacaggtgagggagggagcccttccacgtttggag

SEQ ID NO: 2543 - DNA, 497 bp, Homo sapiens
  misc_feature (1)...(497): n = A,T,C or G
acgccgcgagccgcgtcccntgccnntggnngccctggtgaatggatcgccccgggcggcaccggacnnctcccnnatgccnnagcnnctnancnntgtgggcgnggtggttttgnanannntccaacntgcaattgcaggtttcctcccagacagcagggcctgaactttctcgccgttgganagtcactaggttctctaagcagttcgtacctgatcgggccaactgctcattatctgcaaaattcaacagcatctgttgttaaactttaactgttgtcctgaaagcaaccaaacaggatctgggtctgatggnccatggnctctacctgacactganaggtggggattgtagctggaggcctgtaagctttaatgaagctaggctacgaagagtcagctgttaagagctgaaggatgccaccccaggggatctcttctggccttcacagacattcggcacacacgtggtacacagacatacatgtaggaagaat

SEQ ID NO: 2544 - DNA, 515 bp, Homo sapiens
  misc_feature (1)...(515): n = A,T,C or G
gactgagggactttggtnataatgtccgcttncaaggggccacagactggtagttgagtgatggtgaccttctgacctttggcccccaaggtcaagcaggaaccagctcctcctcagagttctacttcatgtttcaacaagtccgggttaaacctcaggactttgcagccataaccngtccctcggtctaagggagaagctgggggcggtttccaacctatgctgcccccccaaggggcacctcagaggccactcagcactctctcctctgcccccaaggccacactgattctcaattccatcggcagcctcagcaaactccaggcccagcctctcaccttctcccgtggngggggcaggccacagggcctggctattccctctcagcatggggaagcgcaagtttcgcctgctccacccacaanaaaccggaggaaatcagctcataaagtgttggcanagctagatgatgaggtctccccaggccccctgtccgtcctgacggagcccaggaa

SEQ ID NO: 2545 - DNA, 256 bp, Homo sapiens
  misc_feature (1)...(256): n = A,T,C or G
ctgaggtgttctggctgcacacnagcataatggccagctccccagcacatggaccaagctacggtctcggccctccgganganaggggtgaacctgacaccccacaacaaagagactgngctgccacagagangtgctcttcctggctgtgaagccacacatnatccccttcatnctggatgaaatnggggccaacattgaggacaggcacattgtggngtcttgtgcggcaggggtcaccatcacctccatcgaa

SEQ ID NO: 2546 - DNA, 529 bp, Homo sapiens
  misc_feature (1)...(529): n = A,T,C or G
gactgaggtagaagatgtccagnacttgtggntctggaattaggtttccagcagactgttcccgtgtgtccagacaaaaccaaaaccttcctctttattgatgagaagagagtagttggatgtttaattgcagaacccatcaaacaggcctttcgggtcctgtcagaaccaagtgccagtaaagaatgttctagagcttggcggtgttcagatgtaccagaacctgcaatttgtggaataagtagaatctgggtcttcagactaaaaagaaggaagcgcattgcaagacgactggttgacactgtcaggaattgcttcatgtttggctgtttcctcagcactaatgaaattgcattttctgacccaacaccagatggcaaattatttgcaaccaagtactgcaacaccccaaatttccttgtatataattttcataactaaagccaattgtaaccacaaatctggtactatgtgggaaagttcagctagatagaaactgattaatcgtagcagaatgaacatactaaga

SEQ ID NO: 2547 - DNA, 524 bp, Homo sapiens
  misc_feature (1)...(524): n = A,T,C or G
ccggtatccactatgcttctggaagaagtctgcgtcggcgaccggntgagtggcgcagcggcccgtggcgacgtgcaagaggtccgccgccttcttcaccgggagctggtgcatcctgacgccctgaaccgctttggcaagacggccttgcaggtcatgatgtttggaagtccagcagttgctttggagctcctgaagcaaggtgccagccccaatgtccaagatgcctncggtactagtcctgtgcatgatgcggctcgcaccgggttcctggacaccctgaaggttctggtggagcatggtgctgatgtcaatgccctggacagcactgggtcgctccccatccatctggngataagagagggccatagctccgnggtcagnttcctagctcctgaatctgatctccaccacagggacgcttccggtctcactctccntggagttggctcggcagagaggggctcagaacctcatggacattctgcaggggcacatgatgatccccaatgtgaccccaaggc

SEQ ID NO: 2548 - DNA, 178 bp, Homo sapiens
gactgaggtaaatcccaacagcattgcagccaaagatggccggatccgtgagggagacagaatcatccagattaatggaatggatgtccaaaatcgagaggaggcagtggccatcctgagccaggaggagaacactaacatctccctgctggtggcccgacctgagagccagctagca

SEQ ID NO: 2549 - DNA, 393 bp, Homo sapiens
gacgatggcatcaaccgcatggtgcggcagatgcacgggctgcgcacgctcaacattggacagtgtgtgcgcatcacggacaagggcctggagctgatcgctgagcacctgagccagctcacgggcatagatctgtacggctgcaccaggatcaccaagcgcggcctggagctgcatcactgcagctgccctgcctcaagagtcctccacagcaacatgagagaccatggagaaacccagagacctttatcaattaattgtactgtttgtgaatttgtataaataacaaagatcctcttaaaacgtttatattcttacagcaaaaggttaaactgatatttatataataaaagaggaaatatgaagtatgtttttgaaaaaaaaagcccaaaa
